(19) United States
(12) Patent Application Publication
(10) Pub. No.: US 2015/0238515 A1
(43) Pub. Date: Aug. 27, 2015

(54) ORGANIC COMPOSITIONS TO TREAT KRAS-RELATED DISEASES

(71) Applicant: Arrowhead Research Corporation, Pasadena, CA (US)

(72) Inventors: Brian Bettencourt, Cambridge, MA (US); Stuart Milstein, Cambridge, MA (US); Ivanka Jarska, Cambridge, MA (US); Earl McDonald, Cambridge, MA (US); Michael Schlabach, JR., Cambridge, MA (US); Frank P. Stegmeier, Acton, MA (US); Markus Warmuth, Cambridge, MA (US); Kalyani Gampa, Natick, MA (US); Dieter Huesken, Freiburg i. Br. (DE); Mark Stump, Lexington, MA (US); Jan Weiler, Newton, MA (US); Zainab Jagani, Brookline, MA (US)

(21) Appl. No.: 14/397,815

(22) PCT Filed: Apr. 30, 2013
(86) PCT No.: PCT/US2013/038847

§ 371 Date: Oct. 29, 2014

Related U.S. Application Data
(60) Provisional application No. 61/641,588, filed on May 2, 2012.

(51) Int. Cl. A61K 31/713; A61K 45/06; A61K 47/48; C12N 15/113

(52) U.S. Cl. CPC A61K 31/713; C12N 15/113; A61K 45/06; A61K 47/48092; C12N 2310/14

(57) ABSTRACT

The present disclosure relates to RNAi agents useful in methods of treating KRAS-related diseases such as a proliferative disease, including without limitation a solid or liquid cancer, adenocarcinoma, colorectal cancer, advanced and/or metastatic colorectal cancer, colon cancer, lung, non-small cell lung cancer and lung adenocarcinoma, acute myelogenous lung, bladder, brain, breast, cervical, endometrial, gastric, head and neck, kidney, leukemia, myelodysplastic syndrome, myeloid leukemia, liver, melanoma, ovarian, pancreatic, prostate, testicular, thyroid cancers, and cardio-facio-cutaneous (CFC) syndrome and Noonan syndrome, and similar and related diseases, using a therapeutically effective amount of a RNAi agent to KRAS.

### BACKGROUND OF THE INVENTION

[0001] KRAS is a member of the RAS subfamily of small GTPases. It is involved in cellular signal transduction, growth, differentiation, survival and other cellular functions. Over-expression or hyper-activity of KRAS, along with RAS family members HRAS and NRAS, have been associated with a number of diseases, including various cancers. RAS mutations are found in approximately one-third of all human malignancies. Bos et al. 1989. Cancer Res. 49: 4682-4689. KRAS accounts for most of the RAS mutations found in the majority of human malignancies, including 90% of RAS mutations in lung adenocarcinomas. Forbes et al. 2006. Br. J. Cancer 94: 318-322.

[0002] Mutations, hyper-activity and/or over-expression of KRAS in particular has been associated with cancer, including adenocarcinoma, colorectal cancer (including advanced and metastatic colorectal cancer), colon cancer, lung (including non-small cell lung cancer and lung adenocarcinoma), acute myelogenous lung, bladder, brain, breast, cervical, endometrial, gastric, head and neck, kidney, leukemia, myelodysplastic syndrome, myeloid leukemia, liver, melanoma, ovarian, pancreatic, prostate, testicular, thyroid cancers, and cardio-facio-cutaneous (CFC) syndrome and Noonan syndrome, and similar and related diseases.

[0003] There exists the need for treatments related to KRAS-related diseases.

### BRIEF SUMMARY OF THE INVENTION

[0004] The present disclosure encompasses RNAi (RNA interference) agents to KRAS, which are useful in the treatment of KRAS-related diseases, such as cancer, cardio-facio-cutaneous (CFC) syndrome and Noonan syndrome, and similar and related diseases.

[0005] The present disclosure also encompasses a method of treating a human subject having a pathological state mediated at least in part by KRAS expression, the method comprising the step of administering to the subject a therapeutically effective amount of a RNAi agent KRAS.

[0006] The method also optionally further comprises the step of administering a second agent. In some embodiments, this second agent is another RNAi agent to KRAS. In other embodiments, the second agent is another treatment, such as one directed to another target, which is also hyper-active, mutated and/or over-expressed in the pathological state.

[0007] The present disclosure provides specific RNAi agents and methods that are useful in reducing KRAS levels in a subject, e.g., a mammal, such as a human. The present disclosure specifically provides double-stranded RNAi agents comprising at least 15 to at least 19 or more contiguous nucleotides of KRAS. In particular, the present disclosure provides agents comprising sequences of 15 or more contiguous nucleotides differing by 0, 1, 2 or 3 from those of the RNAi agents provided, e.g., in Tables 1 to 6. The RNAi agents particularly can in one embodiment comprise less than 30 nucleotides per strand, e.g., such as 17-23 nucleotides, 15-19, 18-22 nucleotides, and/or 19-21 nucleotides, and/or such as those provided, e.g., in Tables 1 to 6, and modified and unmodified variants thereof (e.g., wherein the sense and/or anti-sense or first and/or second strand are modified or unmodified). The present disclosure also provides agents comprising a sense strand and an anti-sense strand, wherein the sense and/or the anti-sense strand comprise sequences of 19 or more contiguous nucleotides differing by 0, 1, 2 or 3 from those of the RNAi agents provided, e.g., in Tables 1 to 6, and modified or unmodified variants thereof. The sense and anti-sense strand can be contiguous, or covalently bounds, e.g., via a loop or linker. The RNAi agents particularly can in one embodiment comprise less than 30 nucleotides per strand, e.g., such as 17 to 23 nucleotides, 18 to 22 nucleotides, and/or 19 to 21 nucleotides, and/or sequences such as those provided, e.g., in Tables 1 to 6.

[0008] The double-stranded RNAi agents can have 0, 1 or 2 blunt ends, and/or overhangs of 1, 2, 3 or 4 nucleotides (i.e., 1 to 4 nt) from one or both 3′ and/or 5′ ends. The double-stranded RNAi agents can also optionally comprise one or two 3′ caps and/or one or more modified nucleotides. Modified variants of sequences as provided herein include those that are otherwise identical but contain substitutions of a naturally-occurring nucleotide for a corresponding modified nucleotide.

[0009] Furthermore, the RNAi agent can either contain only naturally-occurring nucleotide subunits (e.g., ribonucleotides), or one or more modifications to the sugar, phosphate or base of one or more of the replacement nucleotide subunits, whether they comprise ribonucleotide subunits or deoxyribonucleotide subunits or other related modified variants. In one embodiment, modified variants of the disclosed RNAi agents have a thymidine (as RNA, or, preferably, DNA) replacing a uridine, or have an inosine base. In some embodiments, the modified variants of the disclosed RNAi agents can have a nick in the passenger strand, mismatches between the guide and passenger strand, DNA replacing the RNA of a portion of both the guide and passenger strand (e.g., the seed region), and/or a shortened passenger strand (e.g., 15, 16, 17 or 18 nt). Once a functional guide strand is identified, modifications and variants of the RNAi agent can be readily made. Any combination of modifications which is not mutually exclusive can be (e.g., the combination of base modifications with shortened passenger strand; or nicked passenger strand and base modifications; or DNA replacing part or all of the seed region and base modifications in the remaining RNA; etc.).

[0010] In one embodiment, modified variants of the disclosed RNAi agents include RNAi agents with the same sequence (e.g., the same sequence of bases) as disclosed in Tables 1 to 6, but with one or more modifications to one or more of the sugar or phosphate of one or more of the nucleotide subunits. In one embodiment, the modifications improve efficacy, stability (e.g., against nucleases in, for example, blood serum or intestinal fluid), and/or reduce immunogenicity of the RNAi agent. One aspect of the present disclosure relates to a double-stranded oligonucleotide comprising at least one non-natural nucleobase. In certain embodiments, the non-natural nucleobase is difluorotolyl, nitroindolyl, nitropyrrolyl, or nitroimidazolyl. In a particular embodiment, the non-natural nucleobase is difluorotolyl. In certain embodiments, only one of the two oligonucleotide strands contains a non-natural nucleobase. In certain embodiments, both of the oligonucleotide strands contain a non-natural nucleobase.

[0011] The RNAi agent(s) can optionally be attached to a ligand selected to improve one or more characteristic, such as, e.g., stability, distribution and/or cellular uptake of the agent, e.g., cholesterol or a derivative thereof. The RNAi agent(s) can be isolated or be part of a pharmaceutical composition used for the methods described herein. Particularly, the pharmaceutical composition can be formulated for delivery to specific tissues (e.g., those afflicted with a KRAS-related disease) or formulated for parenteral administration. The pharmaceutical composition can optionally comprise two or more RNAi agents, each one directed to the same or a different segment of the KRAS mRNA. Optionally, the pharmaceutical composition can further comprise or be used in conjunction with any known treatment for any KRAS-related disease.

[0012] The present disclosure further provides methods for reducing the level of KRAS mRNA in a cell, particularly in the case of a disease characterized by over-expression or hyper-activity of KRAS. Cells comprising an alteration such as a mutation, over-expression and/or hyperactivity of KRAS are termed “KRAS-defective” cells. Such methods comprise the step of administering one or more of the RNAi agents of the present disclosure to a cell, as further described below. The present methods utilize the cellular mechanisms involved in RNA interference to selectively degrade the target RNA in a cell and are comprised of the step of contacting a cell with one or more of the RNAi agents of the present disclosure.

[0013] The present disclosure further provides methods for reducing the level of KRAS mRNA in a cell, particularly in the case of a disease characterized by over-expression, mutation or hyper-activity of KRAS. Such methods comprise the step of administering one or more of the RNAi agents of the present disclosure to a cell, as further described below. The present methods utilize the cellular mechanisms involved in RNA interference to selectively degrade the target RNA in a cell and are comprised of the step of contacting a cell with one or more of the RNAi agents of the present disclosure.

[0014] The present disclosure also encompasses a method of treating a human subject having a pathological state mediated at least in part by KRAS expression, the method comprising the step of administering to the subject a therapeutically effective amount of a RNAi agent targeting KRAS. Additional methods involve preventing, treating, modulating and/or ameliorating a pathological state wherein disease progression (e.g., tumor growth) requires KRAS, although KRAS is not amplified, over-expressed or mis-localized. Such methods comprise the step of administering one or more of the RNAi agents of the present disclosure to a subject, as further described below. The present methods utilize the cellular mechanisms involved in RNA interference to selectively degrade the target RNA in a cell comprise the step of contacting a cell with one or more of the RNAi agents of the present disclosure. Such methods can be performed directly on a cell or can be performed on a mammalian subject by administering to a subject one or more of the RNAi agents/pharmaceutical compositions of the present disclosure. Reduction of target KRAS RNA in a cell results in a reduction in the amount of encoded KRAS protein produced. In an organism, this can result in restoration of balance in a pathway involving KRAS, and/or prevention of KRAS accumulation, and/or a reduction in KRAS activity and/or expression, and/or prevention of KRAS-mediated activation of other genes, and/or amelioration, treatment and/or prevention of a KRAS-related disease. In one embodiment, a reduction in KRAS expression, level or activity can limit tumor growth.

[0015] The methods and compositions of the present disclosure, e.g., the methods and KRAS RNAi agent compositions, can be used in any appropriate dosage and/or formulation described herein or known in the art, as well as with any suitable route of administration described herein or known in the art.

[0016] The details of one or more embodiments of the present disclosure are set forth in the accompanying drawings and the description below. Elements of the various embodiments (e.g., sequences, modifications, endcaps, combinations of RNAi agents, combination therapy involving a KRAS RNAi agent and another agent, etc.) which are not mutually-exclusive can be combined with each other as described herein and as known or developed in the art. For example, any RNAi agent sequence disclosed herein can be combined with any set of modifications or endcaps disclosed herein. Any combination of modifications, 5′ end caps, and/or 3′ end caps can be used with any RNAi agent sequence disclosed herein. Any RNAi agent disclosed herein (with any combination of modifications or endcaps or without either modifications or endcaps) can be combined with any other RNAi agent or other treatment composition or method disclosed herein.

[0017] Other features, objects, and advantages of the present disclosure will be apparent from this description, the drawings, and from the claims.

### BRIEF DESCRIPTION OF THE FIGURE

[0018] FIG. 1 illustrates various modified nucleotides: U002, U003, U004, U005, C004, C005, A004, A005, G005, and G004, which can be used in the RNAi agents disclosed herein. U002 indicates a 2′-deoxy-thymidine which is DNA. U003 indicates 2′-deoxy uridine. U004 indicates a nucleotide with a Uridine (“U”) base with a 2′-O-methyl modification. U005 indicates a U base with a 2′-O-methoxyethyl (MOE) modification. C004 indicates a Cysteine (“C”) base with a 2′-O-methyl modification. C005 indicates a C base with 2′-O-methoxyethyl modification. A004 indicates an Adenosine (“A”) base with a 2′-O-methyl modification. A005 indicates an A base with 2′-O-methoxyethyl modification. G005 indicates a Guanosine (“G”) base with a 2′O-methyl modification. G004 indicates a G base with a 2′O-methyl modification.

### DETAILED DESCRIPTION OF THE INVENTION

[0019] The present disclosure encompasses RNAi agents to KRAS, for targeting and inhibition of the KRAS gene, which are useful in treatment of KRAS-related diseases (e.g., diseases associated with mutations in and/or altered expression, level and/or activity of KRAS, and/or diseases which require KRAS, and/or diseases treatable by modulating the expression, level and/or activity of KRAS), such as a proliferative disease, including without limitation a solid or liquid cancer, adenocarcinoma, colorectal cancer, advanced and/or metastatic colorectal cancer, colon cancer, lung, non-small cell lung cancer and lung adenocarcinoma, acute myelogenous lung, bladder, brain, breast, cervical, endometrial, gastric, head and neck, kidney, leukemia, myelodysplastic syndrome, myeloid leukemia, liver or hepatic, melanoma, ovarian, pancreatic, prostate, testicular, thyroid cancers, and cardio-facio-cutaneous (CFC) syndrome and Noonan syndrome, and similar and related diseases. The present disclosure also provides methods of treating a human subject having a pathological state mediated at least in part by KRAS expression or over-expression or hyper-activity, the method comprising the step of administering to the subject a therapeutically effective amount of a RNAi agent to KRAS.

[0020] Various Embodiments of the Present Disclosure Include the Following.

[0021] In one embodiment, the present disclosure relates to a composition comprising a RNAi agent comprising a sense strand and an antisense strand, wherein the antisense strand comprises at least 15 contiguous nucleotides differing by 0, 1, 2, or 3 nucleotides from the antisense strand of a RNAi agent specific to KRAS (or any set of overlapping RNAi agents specific to KRAS) provided, e.g., in any of Tables 1 to 6. In another embodiment, the present disclosure relates to a composition comprising a RNAi agent comprising a sense and an anti-sense strand, wherein the sense strand comprises at least 15 contiguous nucleotides differing by 0, 1, 2, or 3 nucleotides from the sense strand of a RNAi agent from any sequence provided herein. In another embodiment, the present disclosure relates to a composition comprising a RNAi agent comprising a first strand and a second strand, wherein the first strand comprises at least 15 contiguous nucleotides differing by 0, 1, 2, or 3 nucleotides from the sequence of the first strand, and the second strand comprises at least 15 contiguous nucleotides differing by 0, 1, 2, or 3 nucleotides from the sequence of the second strand of any RNAi agent provided herein.

[0022] Particular duplexes include the example unmodified (e.g., “generic”) and example modified sequences listed in Table 1. In addition to the described example modifications, other modified variants are contemplated and can be made using the nucleotide sequences provided. In various embodiments, the first and/or second strand are modified or unmodified or a combination of one modified and one unmodified.

[0023] RNAi Agents Comprising an Antisense and a Sense Strand Described Herein

[0024] In one embodiment, the present disclosure relates to a composition comprising a RNAi agent comprising an antisense strand, wherein the antisense strand comprises at least 15 contiguous nucleotides differing by 0, 1, 2, or 3 nucleotides from the antisense strand of a RNAi agent to KRAS selected from any sequence (or overlapping set of sequences) provided in a table herein (e.g., any of Tables 1 to 6). In one embodiment, the present disclosure relates to a composition comprising a RNAi agent comprising a sense strand and an antisense strand, wherein the antisense strand comprises at least 15 contiguous nucleotides differing by 0 nucleotides from the antisense strand of a RNAi agent to KRAS selected from any sequence (or overlapping set of sequences) provided in a table here (e.g., any of Tables 1 to 6). In another embodiment, the present disclosure relates to a composition comprising a RNAi agent comprising a sense and an anti-sense strand, wherein the sequence of the anti-sense strand comprises the sequence of the anti-sense strand of a RNAi agent from any sequence provided herein. In another embodiment, the present disclosure relates to a composition comprising a RNAi agent comprising a first strand and a second strand, wherein the sequence of the first strand is the sequence of the first strand of any RNAi agent provided herein. Particular duplexes include those specific duplexes provided above and as listed in any one or more of Table 1. Additional modified sequences (e.g., sequences comprising one or more modified base) of each of the compositions above are also contemplated as part of the present disclosure.

TABLE 1
SEQ ID NOs. for RNAi Agents to KRAS
Table 1. SEQ ID NOs for unmodified and example
modified sequences of a first and a second strand (e.g.,
sense and anti-sense strand) for RNAi agents to KRAS

| | UNMOD- | | | SE- |
|---|---|---|---|---|
| | IFIED | | EXAM- | QUENCES |
| | SE- | ANTI- | PLE MOD- | ANTI- |
| | QUENCES | SENSE | IFIED | SENSE |
| | SENSE SEQ | SEQ | SENSE SEQ | SEQ |
| Duplex | ID NO: | ID NO: | ID NO: | ID NO: |
| AD-35523.3 | 1 | 428 | 855 | 1282 |
| AD-35529.1 | 2 | 429 | 856 | 1283 |
| AD-35535.4 | 3 | 430 | 857 | 1284 |
| AD-35541.4 | 4 | 431 | 858 | 1285 |
| AD-35547.4 | 5 | 432 | 859 | 1286 |
| AD-35553.4 | 6 | 433 | 860 | 1287 |
| AD-35559.4 | 7 | 434 | 861 | 1288 |
| AD-35565.4 | 8 | 435 | 862 | 1289 |
| AD-35524.4 | 9 | 436 | 863 | 1290 |
| AD-35530.4 | 10 | 437 | 864 | 1291 |
| AD-35536.4 | 11 | 438 | 865 | 1292 |
| AD-35542.4 | 12 | 439 | 866 | 1293 |
| AD-35548.4 | 13 | 440 | 867 | 1294 |
| AD-35554.4 | 14 | 441 | 868 | 1295 |
| AD-35560.2 | 15 | 442 | 869 | 1296 |
| AD-35566.4 | 16 | 443 | 870 | 1297 |
| AD-35525.2 | 17 | 444 | 871 | 1298 |
| AD-35531.4 | 18 | 445 | 872 | 1299 |
| AD-35537.4 | 19 | 446 | 873 | 1300 |
| AD-35543.2 | 20 | 447 | 874 | 1301 |
| AD-35549.4 | 21 | 448 | 875 | 1302 |
| AD-35555.4 | 22 | 449 | 876 | 1303 |
| AD-35561.4 | 23 | 450 | 877 | 1304 |
| AD-35567.4 | 24 | 451 | 878 | 1305 |
| AD-35526.4 | 25 | 452 | 879 | 1306 |
| AD-35532.4 | 26 | 453 | 880 | 1307 |
| AD-35538.4 | 27 | 454 | 881 | 1308 |
| AD-35544.4 | 28 | 455 | 882 | 1309 |
| AD-35550.4 | 29 | 456 | 883 | 1310 |
| AD-35556.4 | 30 | 457 | 884 | 1311 |
| AD-35562.4 | 31 | 458 | 885 | 1312 |
| AD-35568.4 | 32 | 459 | 886 | 1313 |
| AD-35527.4 | 33 | 460 | 887 | 1314 |
| AD-35533.4 | 34 | 461 | 888 | 1315 |
| AD-35539.4 | 35 | 462 | 889 | 1316 |
| AD-35545.4 | 36 | 463 | 890 | 1317 |
| AD-35551.4 | 37 | 464 | 891 | 1318 |
| AD-35563.4 | 38 | 465 | 892 | 1319 |
| AD-35528.4 | 39 | 466 | 893 | 1320 |
| AD-35540.4 | 40 | 467 | 894 | 1321 |
| AD-35546.4 | 41 | 468 | 895 | 1322 |
| AD-35552.4 | 42 | 469 | 896 | 1323 |
| AD-35558.4 | 43 | 470 | 897 | 1324 |
| AD-35564.4 | 44 | 471 | 898 | 1325 |
| AD-35570.4 | 45 | 472 | 899 | 1326 |
| AD-35571.4 | 46 | 473 | 900 | 1327 |
| AD-35577.4 | 47 | 474 | 901 | 1328 |
| AD-35583.4 | 48 | 475 | 902 | 1329 |
| AD-35589.4 | 49 | 476 | 903 | 1330 |
| AD-35595.4 | 50 | 477 | 904 | 1331 |
| AD-35601.4 | 51 | 478 | 905 | 1332 |
| AD-35607.4 | 52 | 479 | 906 | 1333 |
| AD-35613.4 | 53 | 480 | 907 | 1334 |
| AD-35572.4 | 54 | 481 | 908 | 1335 |
| AD-35578.4 | 55 | 482 | 909 | 1336 |
| AD-35584.4 | 56 | 483 | 910 | 1337 |
| AD-35590.4 | 57 | 484 | 911 | 1338 |
| AD-35596.4 | 58 | 485 | 912 | 1339 |
| AD-35602.4 | 59 | 486 | 913 | 1340 |
| AD-35608.4 | 60 | 487 | 914 | 1341 |
| AD-35614.4 | 61 | 488 | 915 | 1342 |
| AD-35573.4 | 62 | 489 | 916 | 1343 |
| AD-35579.4 | 63 | 490 | 917 | 1344 |
| AD-35585.4 | 64 | 491 | 918 | 1345 |
| AD-35591.4 | 65 | 492 | 919 | 1346 |
| AD-35597.4 | 66 | 493 | 920 | 1347 |
| AD-35603.4 | 67 | 494 | 921 | 1348 |
| AD-35609.4 | 68 | 495 | 922 | 1349 |
| AD-35615.4 | 69 | 496 | 923 | 1350 |
| AD-35574.4 | 70 | 497 | 924 | 1351 |
| AD-35580.1 | 71 | 498 | 925 | 1352 |
| AD-35586.4 | 72 | 499 | 926 | 1353 |
| AD-35592.4 | 73 | 500 | 927 | 1354 |
| AD-35598.4 | 74 | 501 | 928 | 1355 |
| AD-35604.4 | 75 | 502 | 929 | 1356 |
| AD-35610.4 | 76 | 503 | 930 | 1357 |
| AD-35616.4 | 77 | 504 | 931 | 1358 |
| AD-35575.4 | 78 | 505 | 932 | 1359 |
| AD-35581.4 | 79 | 506 | 933 | 1360 |
| AD-35587.4 | 80 | 507 | 934 | 1361 |
| AD-35593.4 | 81 | 508 | 935 | 1362 |
| AD-35599.4 | 82 | 509 | 936 | 1363 |
| AD-35605.4 | 83 | 510 | 937 | 1364 |
| AD-35611.4 | 84 | 511 | 938 | 1365 |
| AD-35617.4 | 85 | 512 | 939 | 1366 |
| AD-35576.4 | 86 | 513 | 940 | 1367 |
| AD-35588.4 | 87 | 514 | 941 | 1368 |
| AD-35667.1 | 88 | 515 | 942 | 1369 |
| AD-35673.1 | 89 | 516 | 943 | 1370 |
| AD-35679.1 | 90 | 517 | 944 | 1371 |
| AD-35685.1 | 91 | 518 | 945 | 1372 |
| AD-35691.1 | 92 | 519 | 946 | 1373 |
| AD-35557.1 | 93 | 520 | 947 | 1374 |
| AD-35618.1 | 94 | 521 | 948 | 1375 |
| AD-35569.1 | 95 | 522 | 949 | 1376 |
| AD-35534.1 | 96 | 523 | 950 | 1377 |
| AD-35582.1 | 97 | 524 | 951 | 1378 |
| AD-35594.1 | 98 | 525 | 952 | 1379 |
| AD-35600.1 | 99 | 526 | 953 | 1380 |
| AD-35606.1 | 100 | 527 | 954 | 1381 |
| AD-35612.1 | 101 | 528 | 955 | 1382 |
| AD-38127.1 | 102 | 529 | 956 | 1383 |
| AD-38133.1 | 103 | 530 | 957 | 1384 |
| AD-38139.1 | 104 | 531 | 958 | 1385 |
| AD-38145.1 | 105 | 532 | 959 | 1386 |
| AD-38151.1 | 106 | 533 | 960 | 1387 |
| AD-38157.1 | 107 | 534 | 961 | 1388 |
| AD-38163.1 | 108 | 535 | 962 | 1389 |
| AD-38169.1 | 109 | 536 | 963 | 1390 |
| AD-38128.1 | 110 | 537 | 964 | 1391 |
| AD-38134.1 | 111 | 538 | 965 | 1392 |
| AD-38140.1 | 112 | 539 | 966 | 1393 |
| AD-38146.1 | 113 | 540 | 967 | 1394 |
| AD-38152.1 | 114 | 541 | 968 | 1395 |
| AD-38158.1 | 115 | 542 | 969 | 1396 |
| AD-38164.1 | 116 | 543 | 970 | 1397 |
| AD-38170.1 | 117 | 544 | 971 | 1398 |
| AD-38129.1 | 118 | 545 | 972 | 1399 |
| AD-38135.1 | 119 | 546 | 973 | 1400 |
| AD-38141.1 | 120 | 547 | 974 | 1401 |
| AD-38147.1 | 121 | 548 | 975 | 1402 |
| AD-38153.1 | 122 | 549 | 976 | 1403 |
| AD-38159.1 | 123 | 550 | 977 | 1404 |
| AD-38165.1 | 124 | 551 | 978 | 1405 |
| AD-38171.1 | 125 | 552 | 979 | 1406 |
| AD-38130.1 | 126 | 553 | 980 | 1407 |
| AD-38136.1 | 127 | 554 | 981 | 1408 |
| AD-38142.1 | 128 | 555 | 982 | 1409 |
| AD-38148.1 | 129 | 556 | 983 | 1410 |
| AD-38154.1 | 130 | 557 | 984 | 1411 |
| AD-38160.1 | 131 | 558 | 985 | 1412 |
| AD-38166.1 | 132 | 559 | 986 | 1413 |
| AD-38172.1 | 133 | 560 | 987 | 1414 |
| AD-38131.1 | 134 | 561 | 988 | 1415 |
| AD-38137.1 | 135 | 562 | 989 | 1416 |
| AD-38143.1 | 136 | 563 | 990 | 1417 |
| AD-38149.1 | 137 | 564 | 991 | 1418 |
| AD-38155.1 | 138 | 565 | 992 | 1419 |
| AD-38161.1 | 139 | 566 | 993 | 1420 |
| AD-38167.1 | 140 | 567 | 994 | 1421 |
| AD-38173.1 | 141 | 568 | 995 | 1422 |
| AD-38132.1 | 142 | 569 | 996 | 1423 |
| AD-38138.1 | 143 | 570 | 997 | 1424 |
| AD-38144.1 | 144 | 571 | 998 | 1425 |
| AD-38150.1 | 145 | 572 | 999 | 1426 |
| AD-38156.1 | 146 | 573 | 1000 | 1427 |
| AD-38162.1 | 147 | 574 | 1001 | 1428 |
| AD-38168.1 | 148 | 575 | 1002 | 1429 |
| AD-38174.1 | 149 | 576 | 1003 | 1430 |
| AD-39683.1 | 150 | 577 | 1004 | 1431 |
| AD-39689.1 | 151 | 578 | 1005 | 1432 |
| AD-39695.1 | 152 | 579 | 1006 | 1433 |
| AD-39701.1 | 153 | 580 | 1007 | 1434 |
| AD-39707.1 | 154 | 581 | 1008 | 1435 |
| AD-39713.1 | 155 | 582 | 1009 | 1436 |
| AD-39719.1 | 156 | 583 | 1010 | 1437 |
| AD-39725.1 | 157 | 584 | 1011 | 1438 |
| AD-39684.1 | 158 | 585 | 1012 | 1439 |
| AD-39690.1 | 159 | 586 | 1013 | 1440 |
| AD-39696.1 | 160 | 587 | 1014 | 1441 |
| AD-39702.1 | 161 | 588 | 1015 | 1442 |
| AD-39708.1 | 162 | 589 | 1016 | 1443 |
| AD-39714.1 | 163 | 590 | 1017 | 1444 |
| AD-39720.1 | 164 | 591 | 1018 | 1445 |
| AD-39726.1 | 165 | 592 | 1019 | 1446 |
| AD-39685.1 | 166 | 593 | 1020 | 1447 |
| AD-39691.1 | 167 | 594 | 1021 | 1448 |
| AD-39697.1 | 168 | 595 | 1022 | 1449 |
| AD-39703.1 | 169 | 596 | 1023 | 1450 |
| AD-39709.1 | 170 | 597 | 1024 | 1451 |
| AD-39715.1 | 171 | 598 | 1025 | 1452 |
| AD-39721.1 | 172 | 599 | 1026 | 1453 |
| AD-39727.1 | 173 | 600 | 1027 | 1454 |
| AD-39686.1 | 174 | 601 | 1028 | 1455 |
| AD-39692.1 | 175 | 602 | 1029 | 1456 |
| AD-39698.1 | 176 | 603 | 1030 | 1457 |
| AD-39704.1 | 177 | 604 | 1031 | 1458 |
| AD-39710.1 | 178 | 605 | 1032 | 1459 |
| AD-39716.1 | 179 | 606 | 1033 | 1460 |
| AD-39722.1 | 180 | 607 | 1034 | 1461 |
| AD-39728.1 | 181 | 608 | 1035 | 1462 |
| AD-39687.1 | 182 | 609 | 1036 | 1463 |
| AD-39693.1 | 183 | 610 | 1037 | 1464 |
| AD-39699.1 | 184 | 611 | 1038 | 1465 |
| AD-39705.1 | 185 | 612 | 1039 | 1466 |
| AD-39711.1 | 186 | 613 | 1040 | 1467 |
| AD-39717.1 | 187 | 614 | 1041 | 1468 |
| AD-39723.1 | 188 | 615 | 1042 | 1469 |
| AD-39729.1 | 189 | 616 | 1043 | 1470 |
| AD-39688.1 | 190 | 617 | 1044 | 1471 |
| AD-39694.1 | 191 | 618 | 1045 | 1472 |
| AD-39700.1 | 192 | 619 | 1046 | 1473 |
| AD-39706.1 | 193 | 620 | 1047 | 1474 |
| AD-39712.1 | 194 | 621 | 1048 | 1475 |
| AD-39718.1 | 195 | 622 | 1049 | 1476 |
| AD-39724.1 | 196 | 623 | 1050 | 1477 |
| AD-39730.1 | 197 | 624 | 1051 | 1478 |
| AD-39736.1 | 198 | 625 | 1052 | 1479 |
| AD-39742.1 | 199 | 626 | 1053 | 1480 |
| AD-39748.1 | 200 | 627 | 1054 | 1481 |
| AD-39754.1 | 201 | 628 | 1055 | 1482 |
| AD-39760.1 | 202 | 629 | 1056 | 1483 |
| AD-39766.1 | 203 | 630 | 1057 | 1484 |
| AD-39772.1 | 204 | 631 | 1058 | 1485 |
| AD-39731.1 | 205 | 632 | 1059 | 1486 |
| AD-39737.1 | 206 | 633 | 1060 | 1487 |
| AD-39743.1 | 207 | 634 | 1061 | 1488 |
| AD-39749.1 | 208 | 635 | 1062 | 1489 |
| AD-39755.1 | 209 | 636 | 1063 | 1490 |
| AD-39761.1 | 210 | 637 | 1064 | 1491 |
| AD-39767.1 | 211 | 638 | 1065 | 1492 |
| AD-39773.1 | 212 | 639 | 1066 | 1493 |
| AD-39732.1 | 213 | 640 | 1067 | 1494 |
| AD-39738.1 | 214 | 641 | 1068 | 1495 |
| AD-39744.1 | 215 | 642 | 1069 | 1496 |
| AD-39750.1 | 216 | 643 | 1070 | 1497 |
| AD-39756.1 | 217 | 644 | 1071 | 1498 |
| AD-39762.1 | 218 | 645 | 1072 | 1499 |
| AD-39768.1 | 219 | 646 | 1073 | 1500 |
| AD-39774.1 | 220 | 647 | 1074 | 1501 |
| AD-39733.1 | 221 | 648 | 1075 | 1502 |
| AD-39739.1 | 222 | 649 | 1076 | 1503 |
| AD-39745.1 | 223 | 650 | 1077 | 1504 |
| AD-39751.1 | 224 | 651 | 1078 | 1505 |
| AD-39757.1 | 225 | 652 | 1079 | 1506 |
| AD-39763.1 | 226 | 653 | 1080 | 1507 |
| AD-39769.1 | 227 | 654 | 1081 | 1508 |
| AD-39775.1 | 228 | 655 | 1082 | 1509 |
| AD-39734.1 | 229 | 656 | 1083 | 1510 |
| AD-39740.1 | 230 | 657 | 1084 | 1511 |
| AD-39746.1 | 231 | 658 | 1085 | 1512 |
| AD-39752.1 | 232 | 659 | 1086 | 1513 |
| AD-39758.1 | 233 | 660 | 1087 | 1514 |
| AD-39764.1 | 234 | 661 | 1088 | 1515 |
| AD-39770.1 | 235 | 662 | 1089 | 1516 |
| AD-39776.1 | 236 | 663 | 1090 | 1517 |
| AD-39735.1 | 237 | 664 | 1091 | 1518 |
| AD-39741.1 | 238 | 665 | 1092 | 1519 |
| AD-39747.1 | 239 | 666 | 1093 | 1520 |
| AD-39753.1 | 240 | 667 | 1094 | 1521 |
| AD-39759.1 | 241 | 668 | 1095 | 1522 |
| AD-39765.1 | 242 | 669 | 1096 | 1523 |
| AD-39771.1 | 243 | 670 | 1097 | 1524 |
| AD-39778.1 | 244 | 671 | 1098 | 1525 |
| AD-39784.1 | 245 | 672 | 1099 | 1526 |
| AD-39790.1 | 246 | 673 | 1100 | 1527 |
| AD-39796.1 | 247 | 674 | 1101 | 1528 |
| AD-39802.1 | 248 | 675 | 1102 | 1529 |
| AD-39808.1 | 249 | 676 | 1103 | 1530 |
| AD-39814.1 | 250 | 677 | 1104 | 1531 |
| AD-39820.1 | 251 | 678 | 1105 | 1532 |
| AD-39779.1 | 252 | 679 | 1106 | 1533 |
| AD-39785.1 | 253 | 680 | 1107 | 1534 |
| AD-39791.1 | 254 | 681 | 1108 | 1535 |
| AD-39797.1 | 255 | 682 | 1109 | 1536 |
| AD-39803.1 | 256 | 683 | 1110 | 1537 |
| AD-39809.1 | 257 | 684 | 1111 | 1538 |
| AD-39815.1 | 258 | 685 | 1112 | 1539 |
| AD-39821.1 | 259 | 686 | 1113 | 1540 |
| AD-39780.1 | 260 | 687 | 1114 | 1541 |
| AD-39786.1 | 261 | 688 | 1115 | 1542 |
| AD-39792.1 | 262 | 689 | 1116 | 1543 |
| AD-39798.1 | 263 | 690 | 1117 | 1544 |
| AD-39804.1 | 264 | 691 | 1118 | 1545 |
| AD-39810.1 | 265 | 692 | 1119 | 1546 |
| AD-39816.1 | 266 | 693 | 1120 | 1547 |
| AD-39822.1 | 267 | 694 | 1121 | 1548 |
| AD-39781.1 | 268 | 695 | 1122 | 1549 |
| AD-39787.1 | 269 | 696 | 1123 | 1550 |
| AD-39793.1 | 270 | 697 | 1124 | 1551 |
| AD-39799.1 | 271 | 698 | 1125 | 1552 |
| AD-39805.1 | 272 | 699 | 1126 | 1553 |
| AD-39811.1 | 273 | 700 | 1127 | 1554 |
| AD-39817.1 | 274 | 701 | 1128 | 1555 |
| AD-39823.1 | 275 | 702 | 1129 | 1556 |
| AD-39782.1 | 276 | 703 | 1130 | 1557 |
| AD-39788.1 | 277 | 704 | 1131 | 1558 |
| AD-39794.1 | 278 | 705 | 1132 | 1559 |
| AD-39800.1 | 279 | 706 | 1133 | 1560 |
| AD-39806.1 | 280 | 707 | 1134 | 1561 |
| AD-39812.1 | 281 | 708 | 1135 | 1562 |
| AD-39818.1 | 282 | 709 | 1136 | 1563 |
| AD-39824.1 | 283 | 710 | 1137 | 1564 |
| AD-39783.1 | 284 | 711 | 1138 | 1565 |
| AD-39789.1 | 285 | 712 | 1139 | 1566 |
| AD-39795.1 | 286 | 713 | 1140 | 1567 |
| AD-39801.1 | 287 | 714 | 1141 | 1568 |
| AD-39807.1 | 288 | 715 | 1142 | 1569 |
| AD-39813.1 | 289 | 716 | 1143 | 1570 |
| AD-39819.1 | 290 | 717 | 1144 | 1571 |
| AD-39825.1 | 291 | 718 | 1145 | 1572 |
| AD-39831.1 | 292 | 719 | 1146 | 1573 |
| AD-39837.1 | 293 | 720 | 1147 | 1574 |
| AD-39843.1 | 294 | 721 | 1148 | 1575 |
| AD-39849.1 | 295 | 722 | 1149 | 1576 |
| AD-39855.1 | 296 | 723 | 1150 | 1577 |
| AD-39861.1 | 297 | 724 | 1151 | 1578 |
| AD-39867.1 | 298 | 725 | 1152 | 1579 |
| AD-39826.1 | 299 | 726 | 1153 | 1580 |
| AD-39832.1 | 300 | 727 | 1154 | 1581 |
| AD-39838.1 | 301 | 728 | 1155 | 1582 |
| AD-39844.1 | 302 | 729 | 1156 | 1583 |
| AD-39850.1 | 303 | 730 | 1157 | 1584 |
| AD-39856.1 | 304 | 731 | 1158 | 1585 |
| AD-39862.1 | 305 | 732 | 1159 | 1586 |
| AD-39868.1 | 306 | 733 | 1160 | 1587 |
| AD-39827.1 | 307 | 734 | 1161 | 1588 |
| AD-39833.1 | 308 | 735 | 1162 | 1589 |
| AD-39839.1 | 309 | 736 | 1163 | 1590 |
| AD-39845.1 | 310 | 737 | 1164 | 1591 |
| AD-39851.1 | 311 | 738 | 1165 | 1592 |
| AD-39857.1 | 312 | 739 | 1166 | 1593 |
| AD-39863.1 | 313 | 740 | 1167 | 1594 |
| AD-39869.1 | 314 | 741 | 1168 | 1595 |
| AD-39828.1 | 315 | 742 | 1169 | 1596 |
| AD-39834.1 | 316 | 743 | 1170 | 1597 |
| AD-39840.1 | 317 | 744 | 1171 | 1598 |
| AD-39846.1 | 318 | 745 | 1172 | 1599 |
| AD-39852.1 | 319 | 746 | 1173 | 1600 |
| AD-39858.1 | 320 | 747 | 1174 | 1601 |
| AD-39864.1 | 321 | 748 | 1175 | 1602 |
| AD-39870.1 | 322 | 749 | 1176 | 1603 |
| AD-39829.1 | 323 | 750 | 1177 | 1604 |
| AD-39835.1 | 324 | 751 | 1178 | 1605 |
| AD-39841.1 | 325 | 752 | 1179 | 1606 |
| AD-39853.1 | 326 | 753 | 1180 | 1607 |
| AD-39859.1 | 327 | 754 | 1181 | 1608 |
| AD-39865.1 | 328 | 755 | 1182 | 1609 |
| AD-39871.1 | 329 | 756 | 1183 | 1610 |
| AD-39830.1 | 330 | 757 | 1184 | 1611 |
| AD-39836.1 | 331 | 758 | 1185 | 1612 |
| AD-39842.1 | 332 | 759 | 1186 | 1613 |
| AD-39848.1 | 333 | 760 | 1187 | 1614 |
| AD-39854.1 | 334 | 761 | 1188 | 1615 |
| AD-39860.1 | 335 | 762 | 1189 | 1616 |
| AD-39866.1 | 336 | 763 | 1190 | 1617 |
| AD-39992.1 | 337 | 764 | 1191 | 1618 |
| AD-39998.1 | 338 | 765 | 1192 | 1619 |
| AD-40004.1 | 339 | 766 | 1193 | 1620 |
| AD-40010.1 | 340 | 767 | 1194 | 1621 |
| AD-40016.1 | 341 | 768 | 1195 | 1622 |
| AD-40022.1 | 342 | 769 | 1196 | 1623 |
| AD-40028.1 | 343 | 770 | 1197 | 1624 |
| AD-40034.1 | 344 | 771 | 1198 | 1625 |
| AD-39999.1 | 345 | 772 | 1199 | 1626 |
| AD-40005.1 | 346 | 773 | 1200 | 1627 |
| AD-40011.1 | 347 | 774 | 1201 | 1628 |
| AD-40017.1 | 348 | 775 | 1202 | 1629 |
| AD-40029.1 | 349 | 776 | 1203 | 1630 |
| AD-40035.1 | 350 | 777 | 1204 | 1631 |
| AD-39994.1 | 351 | 778 | 1205 | 1632 |
| AD-40000.1 | 352 | 779 | 1206 | 1633 |
| AD-40006.1 | 353 | 780 | 1207 | 1634 |
| AD-40012.1 | 354 | 781 | 1208 | 1635 |
| AD-40018.1 | 355 | 782 | 1209 | 1636 |
| AD-40024.1 | 356 | 783 | 1210 | 1637 |
| AD-40030.1 | 357 | 784 | 1211 | 1638 |
| AD-40036.1 | 358 | 785 | 1212 | 1639 |
| AD-39995.1 | 359 | 786 | 1213 | 1640 |
| AD-40001.1 | 360 | 787 | 1214 | 1641 |
| AD-40007.1 | 361 | 788 | 1215 | 1642 |
| AD-40013.1 | 362 | 789 | 1216 | 1643 |
| AD-40019.1 | 363 | 790 | 1217 | 1644 |
| AD-40025.1 | 364 | 791 | 1218 | 1645 |
| AD-40031.1 | 365 | 792 | 1219 | 1646 |
| AD-40037.1 | 366 | 793 | 1220 | 1647 |
| AD-39996.1 | 367 | 794 | 1221 | 1648 |
| AD-40002.1 | 368 | 795 | 1222 | 1649 |
| AD-40008.1 | 369 | 796 | 1223 | 1650 |
| AD-40014.1 | 370 | 797 | 1224 | 1651 |
| AD-40020.1 | 371 | 798 | 1225 | 1652 |
| AD-40026.1 | 372 | 799 | 1226 | 1653 |
| AD-40032.1 | 373 | 800 | 1227 | 1654 |
| AD-40038.1 | 374 | 801 | 1228 | 1655 |
| AD-39997.1 | 375 | 802 | 1229 | 1656 |
| AD-40009.1 | 376 | 803 | 1230 | 1657 |
| AD-40015.1 | 377 | 804 | 1231 | 1658 |
| AD-40021.1 | 378 | 805 | 1232 | 1659 |
| AD-40027.1 | 379 | 806 | 1233 | 1660 |
| AD-40033.1 | 380 | 807 | 1234 | 1661 |
| AD-40039.1 | 381 | 808 | 1235 | 1662 |
| AD-40045.1 | 382 | 809 | 1236 | 1663 |
| AD-40051.1 | 383 | 810 | 1237 | 1664 |
| AD-40057.1 | 384 | 811 | 1238 | 1665 |
| AD-40063.1 | 385 | 812 | 1239 | 1666 |
| AD-40069.1 | 386 | 813 | 1240 | 1667 |
| AD-40075.1 | 387 | 814 | 1241 | 1668 |
| AD-40081.1 | 388 | 815 | 1242 | 1669 |
| AD-40040.1 | 389 | 816 | 1243 | 1670 |
| AD-40046.1 | 390 | 817 | 1244 | 1671 |
| AD-40052.1 | 391 | 818 | 1245 | 1672 |
| AD-40058.1 | 392 | 819 | 1246 | 1673 |
| AD-40064.1 | 393 | 820 | 1247 | 1674 |
| AD-40070.1 | 394 | 821 | 1248 | 1675 |
| AD-40076.1 | 395 | 822 | 1249 | 1676 |
| AD-40082.1 | 396 | 823 | 1250 | 1677 |
| AD-40041.1 | 397 | 824 | 1251 | 1678 |
| AD-40047.1 | 398 | 825 | 1252 | 1679 |
| AD-40053.1 | 399 | 826 | 1253 | 1680 |
| AD-40059.1 | 400 | 827 | 1254 | 1681 |
| AD-40065.1 | 401 | 828 | 1255 | 1682 |
| AD-40071.1 | 402 | 829 | 1256 | 1683 |
| AD-40077.1 | 403 | 830 | 1257 | 1684 |
| AD-40083.1 | 404 | 831 | 1258 | 1685 |
| AD-40042.1 | 405 | 832 | 1259 | 1686 |
| AD-40048.1 | 406 | 833 | 1260 | 1687 |
| AD-40054.1 | 407 | 834 | 1261 | 1688 |
| AD-40060.1 | 408 | 835 | 1262 | 1689 |
| AD-40066.1 | 409 | 836 | 1263 | 1690 |
| AD-40072.1 | 410 | 837 | 1264 | 1691 |
| AD-40078.1 | 411 | 838 | 1265 | 1692 |
| AD-40084.1 | 412 | 839 | 1266 | 1693 |
| AD-40043.1 | 413 | 840 | 1267 | 1694 |
| AD-40049.1 | 414 | 841 | 1268 | 1695 |
| AD-40055.1 | 415 | 842 | 1269 | 1696 |
| AD-40061.1 | 416 | 843 | 1270 | 1697 |
| AD-40067.1 | 417 | 844 | 1271 | 1698 |
| AD-40073.1 | 418 | 845 | 1272 | 1699 |
| AD-40079.1 | 419 | 846 | 1273 | 1700 |
| AD-40085.1 | 420 | 847 | 1274 | 1701 |
| AD-40044.1 | 421 | 848 | 1275 | 1702 |
| AD-40050.1 | 422 | 849 | 1276 | 1703 |
| AD-40056.1 | 423 | 850 | 1277 | 1704 |
| AD-40062.1 | 424 | 851 | 1278 | 1705 |
| AD-40068.1 | 425 | 852 | 1279 | 1706 |
| AD-40074.1 | 426 | 853 | 1280 | 1707 |
| AD-40080.1 | 427 | 854 | 1281 | 1708 |
| AD-39720.1 | 1716 | 1754 | 1792 | 1830 |
| AD-39706.1 | 1717 | 1755 | 1793 | 1831 |
| AD-39712.1 | 1718 | 1756 | 1794 | 1832 |
| AD-39760.1 | 1719 | 1757 | 1795 | 1833 |
| AD-39732.1 | 1720 | 1758 | 1796 | 1834 |
| AD-35541.4 | 1721 | 1759 | 1797 | 1835 |
| AD-39735.1 | 1722 | 1760 | 1798 | 1836 |
| AD-39741.1 | 1723 | 1761 | 1799 | 1837 |
| AD-39778.1 | 1724 | 1762 | 1800 | 1838 |
| AD-39790.1 | 1725 | 1763 | 1801 | 1839 |
| AD-39822.1 | 1726 | 1764 | 1802 | 1840 |
| AD-35609.4 | 1727 | 1765 | 1803 | 1841 |
| AD-35581.4 | 1728 | 1766 | 1804 | 1842 |
| AD-39845.1 | 1729 | 1767 | 1805 | 1843 |
| AD-39858.1 | 1730 | 1768 | 1806 | 1844 |
| AD-39870.1 | 1731 | 1769 | 1807 | 1845 |
| AD-35576.4 | 1732 | 1770 | 1808 | 1846 |
| AD-35588.4 | 1733 | 1771 | 1809 | 1847 |
| AD-35600.1 | 1734 | 1772 | 1810 | 1848 |
| AD-35606.1 | 1735 | 1773 | 1811 | 1849 |
| AD-38151.1 | 1736 | 1774 | 1812 | 1850 |
| AD-38163.1 | 1737 | 1775 | 1813 | 1851 |
| AD-39999.1 | 1738 | 1776 | 1814 | 1852 |
| AD-38159.1 | 1739 | 1777 | 1815 | 1853 |
| AD-38130.1 | 1740 | 1778 | 1816 | 1854 |
| AD-38136.1 | 1741 | 1779 | 1817 | 1855 |
| AD-40036.1 | 1742 | 1780 | 1818 | 1856 |
| AD-40008.1 | 1743 | 1781 | 1819 | 1857 |
| AD-40021.1 | 1744 | 1782 | 1820 | 1858 |
| AD-40077.1 | 1745 | 1783 | 1821 | 1859 |
| AD-40072.1 | 1746 | 1784 | 1822 | 1860 |
| AD-40061.1 | 1747 | 1785 | 1823 | 1861 |
| AD-40068.1 | 1748 | 1786 | 1824 | 1862 |
| AD-38131.1 | 1749 | 1787 | 1825 | 1863 |
| AD-38167.1 | 1750 | 1788 | 1826 | 1864 |
| KRAS1273 | 1751 | 1789 | 1827 | 1865 |
| 31273_A22S26 | | | | |
| KRAS2892 | 1752 | 1790 | 1828 | 1866 |
| 2892_A37S26 | | | | |
| KRAS4731 | 1753 | 1791 | 1829 | 1867 |
| 4731_A22S26 | | | | |
| AD-39741.1 | 2770 | 2760 | | |
| AD-39735.1 | 2771 | 2761 | | |
| AD-38159.1 | 2772 | 2762 | | |
| NA | 2773 | 2763 | | |
| AD-38130.1 | 2774 | 2764 | | |
| NA | 2775 | 2765 | | |
| NA | 2776 | 2766 | | |
| AD-38136.1 | 2777 | 2767 | | |
| AD-40061.1 | 2778 | 2768 | | |
| AD-35588.4 | 2779 | 2769 | | |
| AD-39845.1 | 2790 | 2780 | | |
| AD-39720.1 | 2791 | 2781 | | |
| AD-35581.4 | 2792 | 2782 | | |
| AD-40068.1 | 2793 | 2783 | | |
| AD-39778.1 | 2794 | 2784 | | |
| AD-35606.1 | 2795 | 2785 | | |
| AD-35609.4 | 2796 | 2786 | | |
| AD-38163.1 | 2797 | 2787 | | |
| AD-35600.1 | 2798 | 2788 | | |
| AD-40008.1 | 2799 | 2789 | | |
| AD-40036.1 | 2810 | 2800 | | |
| AD-39790.1 | 2811 | 2801 | | |
| AD-39870.1 | 2812 | 2802 | | |
| AD-38131.1 | 2813 | 2803 | | |
| AD-40077.1 | 2814 | 2804 | | |
| AD-38167.1 | 2815 | 2805 | | |
| AD-38151.1 | 2816 | 2806 | | |
| AD-39858.1 | 2817 | 2807 | | |
| AD-39706.1 | 2818 | 2808 | | |
| AD-40021.1 | 2819 | 2809 | | |
| AD-39760.1 | 2828 | 2820 | | |
| AD-39822.1 | 2829 | 2821 | | |
| AD-39999.1 | 2830 | 2822 | | |
| AD-40072.1 | 2831 | 2823 | | |
| AD-39732.1 | 2832 | 2824 | | |
| AD-35576.4 | 2833 | 2825 | | |
| AD-39712.1 | 2834 | 2826 | | |
| AD-35541.4 | 2835 | 2827 | | |

[0025] Provided in Table 1 are the nickname of various KRAS RNAi duplexes; the SEQ ID NOs. of unmodified (e.g., “generic”) sense and anti-sense sequences; and the SEQ ID NOs. for example sense and anti-sense strands.

[0026] Table 1, below, provides the SEQ ID NOs for the unmodified and an example modified sequence of the sense and an anti-sense strands of various RNAi agents to KRAS. The base composition of each sequence represented by a SEQ ID NO is provided in more detail in Tables 2 and 3. Table 4 shows overlapping groups of these KRAS RNAi agents. Tables 5 and 6 show efficacy of various KRAS RNAi agents.

[0027] Table 1 presents the SEQ ID identifiers of an example unmodified first and second strand of each KRAS RNAi agent; the Table also provides an example modified sequence for each KRAS RNAi agent. For example, in Table 1, the unmodified sequences of example KRAS RNAi agent nicknamed AD-35523.3 are SEQ ID NOs: 1 and 428. An example set of modified sequences for this duplex is represented by SEQ ID NOs: 855 and 1282. Also note that the “AD” prefix of the nickname is on occasion replaced by “ND”. The name of the RNAi also sometimes has a suffix, such as 0.1. This indicates a particular variant of a duplex. Thus, AD-35523.1, AD-35523.2, AD-35523.3, ND-35523 and the like all indicate KRAS RNAi agents of the same sequence, although they may differ in how they are modified. In these cases, replacement of a U with a T is considered a modification that does not introduce a mismatch; thus, two otherwise identical sequences wherein one or more U bases are replaced by T are still considered to be identical and the same. Some nicknames of RNAi agents also comprise the suffix “b1”, indicating “batch 1.” The various KRAS RNAi agents comprising the nickname AD-35523 thus all have the same base sequence (though not necessarily the same modification), and the suffix “b1” (or “b2” or the like) may indicate a particular batch, though these also have the same sequence.

[0028] Some RNAi agents in Table 1 have alternative names or nicknames. Some nicknames are derived from their position in the KRAS gene and, often, a code for the format for modifications. It is noted, however, that different methodologies are available for numbering the KRAS gene sequence. The numbering used herein for the KRAS gene is for illustration only. Alternative names of some duplexes are listed below:

TABLE 1.1
Alternative Names of some RNAi Agents

| Duplex Name | Nickname |
|---|---|
| AD-39741.1 | hs_KRAS_322_A22S26 |
| AD-38159.1 | hs_KRAS_528_A22S26 |
| AD-39735.1 | hs_KRAS_321_A22S26 |
| AD-38130.1 | hs_KRAS_531_A22S26 |

[0029] NA, not applicable.

[0030] Additional alternative names are provided in Tables 1, 2 and 3. For example, hs_KRAS 1273_A22S26, hs_KRAS 2892_A37S26, and hs_KRAS 4731_A22S26 are also sometimes alternatively designated KRAS1273, KRAS2892, and KRAS4731, respectively.

TABLE 1.2
Additional Alternative Names of some RNAi Agents

| AD | | | SEQ | | SEQ |
|---|---|---|---|---|---|
| nick- | Nickname | | ID | Sense 19mer | ID |
| name | siRNA | Guide 19mer generic | NO. | generic | NO. |
| AD- | hs KRAS | ATCAATTACTACTTGCTTC | 2760 | GAAGCAAGTAGTAAT | 2770 |
| 39741.1 | 322 | | | TGAT | |
| | A22S26 | | | | |
| AD- | hs KRAS | TCAATTACTACTTGCTTCC | 2761 | GGAAGCAAGTAGTAA | 2771 |
| 39735.1 | 321 | | | TTGA | |
| | A22S26 | | | | |
| AD- | hs KRAS | TTTCCTACTAGGACCATAG | 2762 | CTATGGTCCTAGTAG | 2772 |
| 38159.1 | 528 | | | GAAA | |
| | A22S26 | | | | |
| NA | hs KRAS | TAACTTTACATTCATCAGG | 2763 | CCTGATGAATGTAAA | 2773 |
| | 1273 | | | GTTA | |
| | A22S26 | | | | |
| AD- | hs KRAS | TTATTTCCTACTAGGACCA | 2764 | TGGTCCTAGTAGGAA | 2774 |
| 38130.1 | 531 | | | ATAA | |
| | A22S26 | | | | |
| NA | hs KRAS | AATCTAGTTATGACTATTC | 2765 | GAATAGTCATAACTA | 2775 |
| | 4731 | | | GATT | |
| | A22S26 | | | | |
| NA | hs KRAS | TATCTTTATTAAATTCTCC | 2766 | GGAGAATTTAATAAA | 2776 |
| | 2892 | | | GATA | |
| | A37S26 | | | | |
| AD- | NA | TTTATTTCCTACTAGGACC | 2767 | GGTCCTAGTAGGAAA | 2777 |
| 38136.1 | | | | TAAA | |
| AD- | NA | AATTCCATAACTTCTTGCT | 2768 | AGCAAGAAGTTATGG | 2778 |
| 40061.1 | | | | AATT | |
| AD- | NA | TCTATAATGGTGAATATCT | 2769 | AGATATTCACCATTA | 2779 |
| 35588.4 | | | | TAGA | |
| AD- | NA | GATTTAGTATTATTTATGG | 2780 | CCATAAATAATACTA | 2790 |
| 39845.1 | | | | AATC | |
| AD- | NA | AGCTCCAACTACCACAAGT | 2781 | ACTTGTGGTAGTTGG | 2791 |
| 39720.1 | | | | AGCT | |
| AD- | NA | TTATTTATGGCAAATACAC | 2782 | GTGTATTTGCCATAA | 2792 |
| 35581.4 | | | | ATAA | |
| AD- | NA | AATAAAAGGAATTCCATAA | 2783 | TTATGGAATTCCTTT | 2793 |
| 40068.1 | | | | TATT | |
| AD- | NA | TTCTCCATCAATTACTACT | 2784 | AGTAGTAATTGATGG | 2794 |
| 39778.1 | | | | AGAA | |
| AD- | NA | TTCTCTATAATGGTGAATA | 2785 | TATTCACCATTATAG | 2795 |
| 35606.1 | | | | AGAA | |
| AD- | NA | AAATACACAAAGAAAGCCC | 2786 | GGGCTTTCTTTGTGT | 2796 |
| 35609.4 | | | | ATTT | |
| AD- | NA | TTTAATTTGTTCTCTATAA | 2787 | TTATAGAGAACAAAT | 2797 |
| 38163.1 | | | | TAAA | |
| AD- | NA | TCTCTATAATGGTGAATAT | 2788 | ATATTCACCATTATA | 2798 |
| 35600.1 | | | | GAGA | |
| AD- | NA | TCTAGAAGGCAAATCACAT | 2789 | ATGTGATTTGCCTTC | 2799 |
| 40008.1 | | | | TAGA | |
| AD- | NA | AATCACATTTATTTCCTAC | 2800 | GTAGGAAATAAATGT | 2810 |
| 40036.1 | | | | GATT | |
| AD- | NA | GTTTCTCCATCAATTACTA | 2801 | TAGTAATTGATGGAG | 2811 |
| 39790.1 | | | | AAAC | |
| AD- | hs KRAS | ATATCTTCAAATGATTTAG | 2802 | CTAAATCATTTGAAG | 2812 |
| 39870.1 | 459 | | | ATAT | |
| | A37S26 | | | | |
| AD- | NA | TTTCAATAAAAGGAATTCC | 2803 | GGAATTCCTTTTATT | 2813 |
| 38131.1 | | | | GAAA | |
| AD- | NA | CTTGCTAAGTCCTGAGCCT | 2804 | AGGCTCAGGACTTAG | 2814 |
| 40077.1 | | | | CAAG | |
| AD- | NA | CTGATGTTTCAATAAAAGG | 2805 | CCTTTTATTGAAACA | 2815 |
| 38167.1 | | | | TCAG | |
| AD- | NA | TAATTTGTTCTCTATAATG | 2806 | CATTATAGAGAACAA | 2816 |
| 38151.1 | | | | ATTA | |
| AD- | NA | ATCTTCAAATGATTTAGTA | 2807 | TACTAAATCATTTGA | 2817 |
| 39858.1 | | | | AGAT | |
| AD- | NA | ATCGTCAAGGCACTCTTGC | 2808 | GCAAGAGTGCCTTGA | 2818 |
| 39706.1 | | | | CGAT | |
| AD- | NA | TGTCTACTGTTCTAGAAGG | 2809 | CCTTCTAGAACAGTA | 2819 |
| 40021.1 | | | | GACA | |
| AD- | NA | ATTAGCTGTATCGTCAAGG | 2820 | CCTTGACGATACAGC | 2828 |
| 39760.1 | | | | TAAT | |
| AD- | NA | TCGAGAATATCCAAGAGAC | 2821 | GTCTCTTGGATATTC | 2829 |
| 39822.1 | | | | TCGA | |
| AD- | NA | TCTTCAGAGTCCTTAACTC | 2822 | GAGTTAAGGACTCTG | 2830 |
| 39999.1 | | | | AAGA | |
| AD- | NA | ATAACTTCTTGCTAAGTCC | 2823 | GGACTTAGCAAGAAG | 2831 |
| 40072.1 | | | | TTAT | |
| AD- | NA | AATGATTCTGAATTAGCTG | 2824 | CAGCTAATTCAGAAT | 2832 |
| 39732.1 | | | | CATT | |
| AD- | NA | TATAATGGTGAATATCTTC | 2825 | GAAGATATTCACCAT | 2833 |
| 35576.4 | | | | TATA | |
| AD- | NA | TATCGTCAAGGCACTCTTG | 2826 | CAAGAGTGCCTTGAC | 2834 |
| 39712.1 | | | | GATA | |
| AD- | NA | TATTGTTGGATCATATTCG | 2827 | CGAATATGATCCAAC | 2835 |
| 35541.4 | | | | AATA | |

Additional siRNAs disclosed herein also have alternative names. These names begin with AD. These alternative names, nicknames and sequences of the generic (unmodified) sequences are provided below. The target sequence (DNA) corresponding to the Guide and Sense strand are provided. siRNAs include, for example, double-stranded RNA corresponding to the DNA sequences provided (e.g., as RNA with or without any of the following or combination of any of the following: modification(s), terminal TT or other overhang(s), endcap(s), alternative base (LNA, PNA, etc.), and/or a few DNA bases interspersed among the RNA or other bases, etc.).
Additional tables (e.g., Tables 1.1 and 1.2) are continuations of Table 1; thus, references to any Table or Tables include references to additional Tables. For example, references to Table 1 also include references to Tables 1.1 and 1.2; and references to Tables 1 to 6 include Tables 1.1, 1.2, 6.1, 6.2, etc.

### Various Embodiments of the Present Disclosure

[0031] Various RNAi agents to KRAS are disclosed in Tables 1 to 6.

[0032] Tables 1, 2 and 3 provide the sequence, SEQ ID NOs and relative positions of various RNAi agents to KRAS, including both unmodified sequences (listed in Table 2) and example modified sequences (listed in Table 3).

[0033] In the sequences in Table 3, lower-case letters (e.g., c, u) indicate modified nucleotides while upper case letters (e.g., C, U, A, G) indicate unmodified nucleotides. In this Table, example modified versions of each of the sequences are shown. However, the present disclosure also contemplates and encompasses unmodified versions of these sequences and other versions which comprise additional or alternative modifications. Thus, for example, AD-35523.3 can optionally have the unmodified sequences of SEQ ID NO: 1 in the sense strand and SEQ ID NO: 428 in the anti-sense strand. The present disclosure also encompasses alternative modified versions of the duplex comprising the modified sequences of SEQ ID NO: 855 in the sense strand and SEQ ID NO: 1282 in the anti-sense strand. The present disclosure also encompasses different modified variants of SEQ ID NO: 1 in the sense strand and SEQ ID NO: 428 in the anti-sense strand. Similarly, the present disclosure also encompasses any modified variant of any unmodified sequence disclosed herein.

[0034] In the sequences in Tables 1 to 3, the modified and unmodified sequences can optionally comprise the sequence “TT”, “dTdT”, “dTsdT” or “UU” at the 3′ end. Thus, in the example above, AD-35523.3 can optionally have the modified sequences of SEQ ID NO: 855 in the sense strand and SEQ ID NO: 1282 in the anti-sense strand. As noted in Table 3, below, SEQ ID NO: 855 and SEQ ID NO: 1282 include a terminal dTdT. dT is 2′-deoxy-thymidine-5′-phosphate and sdT is 2′-deoxy Thymidine 5′-phosphorothioate. In the disclosed sequences, terminal dinucleotide “UU” is 2′-OMe-U 2′-OMe-U, and neither the terminal TT nor the terminal UU are in the inverted/reverse orientation. The terminal dithymidine (or UU) is not part of the KRAS target sequence, but is a modified variant of the dithymidine dinucleotide commonly placed as an overhang to protect the ends of siRNAs from nucleases (see, for example, Elbashir et al. 2001 Nature 411: 494-498; Elbashir et al. 2001 EMBO J. 20: 6877-6888; and Kraynack et al. 2006 RNA 12:163-176). A terminal dinucleotide is known from these references to enhance nuclease resistance but not contribute to target recognition. Thus, the present disclosure also encompasses any modified or any unmodified sequence disclosed herein, wherein the modified sequence comprises a terminal TT, dTdT, sdT, dTsdT, sdTsdT, sdTdT, or the like which may be in either the inverted/reverse orientation or in the same 5′ to 3′ orientation as the KRAS specific sequence in the duplex. In addition, terminology used herein referring to “the KRAS portion of a RNAi agent sequence” and the like indicate the portion of the sequence of a RNAi agent which is derived from KRAS (thus “the KRAS portion of a RNAi agent sequence” does not include, for example, a terminal dTdT, TT, UU, or the like, but does include the portion of the RNAi agent that corresponds to or is complementary to a portion of the KRAS gene sequence or mRNA sequence.

[0035] On any modified or unmodified sequence, a 3′ end cap, as is known in the art, can be used instead of or in addition to a terminal dinucleotide to stabilize the end from nuclease degradation provided that the 3′ end cap is able to both stablize the RNAi agent (e.g., against nucleases) and not interfere excessively with siRNA activity. Thus, the present disclosure also encompasses any modified or any unmodified sequence disclosed herein, wherein the modified sequence further comprises a terminal 3′ end cap.

[0036] Table 4 provides sets of overlapping RNAi agents to KRAS.

[0037] Activity levels of various KRAS RNAi agents are provided in Tables 5 and 6.

[0038] An RNAi Agent Comprising an Anti-Sense Strand Described Herein

[0039] In one particular specific embodiment, the present disclosure relates to a composition comprising a RNAi agent comprising an anti-sense strand, wherein the anti-sense strand comprises at least 15 contiguous nucleotides differing by 0, 1, 2, or 3 nucleotides from the anti-sense strand of a RNAi agent to KRAS selected from those anti-sense strands in the specific duplexes provided herein and as listed, e.g., in Tables 1 to 6.

[0040] Various specific embodiments of this embodiment are described below.

[0041] In one embodiment, the composition further comprises a second RNAi agent to KRAS. In various embodiments, the second RNAi agent is physically separate from the first, or the two KRAS RNAi agents are physically connected (e.g., covalently linked or otherwise conjugated) or combined in the same pharmaceutical composition, or are both elements in the same treatment regimen.

[0042] In one embodiment, the composition comprises a RNAi agent comprising a first and an second strand, wherein the sequence of the first strand and the sequence of the second strand are the sequences of the first and second strand, respectively, of any RNAi agent provided herein. In one embodiment, the composition comprises a RNAi agent comprising a first and an second strand, wherein the sequence of the first strand and the sequence of the second strand are the sequences of the first and second strand, respectively, of any RNAi agent provided herein, further comprising an additional about 6 to 20 nucleotides on one or both strands (e.g., about 6, 7, 8, 9, 10, 11, 12, 13, 14, 15, 16, 17, 18, 19 or 20 nt). In various embodiments, the first and second strands are the sense and anti-sense strands listed in the Tables herein, respectively. In various embodiments, the first and second strands are the anti-sense and sense strands listed in the Tables herein, respectively.

[0043] In one embodiment, the antisense strand is about 30 or fewer nt in length.

[0044] In one embodiment, the sense strand and the antisense strand form a duplex region of about 15 to about 30 nucleotide pairs in length.

[0045] In one embodiment, the antisense strand is about 15 to about 36 nt in length, including about 18 to about 30 nt in length, and further including about 19 to about 21 nt in length and about 19 to about 23 nt in length. In one embodiment, the antisense strand has at least the length selected from about 15 nt, about 16 nt, about 17 nt, about 18 nt, about 19 nt, about 20 nt, about 21 nt, about 22 nt, about 23 nt, about 24 nt, about 25 nt, about 26 nt, about 27 nt, about 28 nt, about 29 nt and about 30 nt.

[0046] In one embodiment, the RNAi agent comprises a modification that causes the RNAi agent to have increased stability in a biological sample or environment, e.g., cytoplasm, interstitial fluids, blood serum, lung or intestinal lavage fluid.

[0047] In one embodiment, the RNAi agent comprises at least one sugar backbone modification (e.g., phosphorothioate linkage) and/or at least one 2′-modified nucleotide. In one embodiment, all the pyrimidines are 2′ O-methyl-modified nucleotides.

[0048] In one embodiment, the RNAi agent comprises: at least one 5′-uridine-adenine-3′ (5′-ua-3′) dinucleotide, wherein the uridine is a 2′-modified nucleotide; and/or at least one 5′-uridine-guanine-3′ (5′-ug-3′) dinucleotide, wherein the 5′-uridine is a 2′-modified nucleotide; and/or at least one 5′-cytidine-adenine-3′ (5′-ca-3′) dinucleotide, wherein the 5′-cytidine is a 2′-modified nucleotide; and/or at least one 5′-uridine-uridine-3′ (5′-uu-3′) dinucleotide, wherein the 5′-uridine is a 2′-modified nucleotide.

[0049] In one embodiment, the RNAi agent comprises a 2′-modification selected from the group consisting of: 2′-deoxy, 2′-deoxy-2′-fluoro, 2′-O-methyl, 2′-O-methoxyethyl (2′-O-MOE), 2′-O-aminopropyl (2′-O-AP), 2′-O-dimethylaminoethyl (2′-O-DMAOE), 2′-O-dimethylaminopropyl (2′-O-DMAP), 2′-O-dimethylaminoethyloxyethyl (2′-O-DMAEOE), and 2′-O-N-methylacetamido (2′-O-NMA). In one embodiment, all the pyrimidines are 2′ O-methyl-modified nucleotides.

[0050] In one embodiment, the RNAi agent comprises a blunt end.

[0051] In one embodiment, the RNAi agent comprises an overhang having 1 to 4 unpaired nucleotides.

[0052] In one embodiment, the RNAi agent comprises an overhang at the 3′-end of the antisense strand of the RNAi agent.

[0053] In one embodiment, the RNAi agent is ligated to one or more diagnostic compound, reporter group, cross-linking agent, nuclease-resistance conferring moiety, natural or unusual nucleobase, lipophilic molecule, cholesterol, lipid, lectin, steroid, uvaol, hecigenin, diosgenin, terpene, triterpene, sarsasapogenin, Friedelin, epifriedelanol-derivatized lithocholic acid, vitamin, carbohydrate, dextran, pullulan, chitin, chitosan, synthetic carbohydrate, oligo lactate 15-mer, natural polymer, low- or medium-molecular weight polymer, inulin, cyclodextrin, hyaluronic acid, protein, protein-binding agent, integrin-targeting molecule, polycationic, peptide, polyamine, peptide mimic, and/or transferrin.

[0054] In one embodiment, the RNAi agent is capable of inhibiting expression of KRAS by at least about 60% at a concentration of 10 nM in RKO cells in vitro.

[0055] In one embodiment, the RNAi agent is capable of inhibiting expression of KRAS by at least about 70% at a concentration of 10 nM in RKO cells in vitro.

[0056] In one embodiment, the RNAi agent is capable of inhibiting expression of KRAS by at least about 80% at a concentration of 10 nM in RKO cells in vitro.

[0057] In one embodiment, the RNAi agent is capable of inhibiting expression of KRAS by at least about 90% at a concentration of 10 nM in RKO cells in vitro.

[0058] In one embodiment, the RNAi agent has an EC50 of no more than about 0.1 nM in

[0059] MiaPaca2 cells.

[0060] In one embodiment, the RNAi agent has an EC50 of no more than about 0.01 nM in MiaPaca2 cells.

[0061] In one embodiment, the RNAi agent has an EC50 of no more than about 0.001 nM in MiaPaca2 cells.

[0062] A RNAi agent comprising a first and a second strand described herein

[0063] In one particular specific embodiment, the present disclosure relates to a composition comprising a RNAi agent comprising a first strand and a second strand, wherein the sequence of the first strand comprises at least 15 contiguous nucleotides, differing by 0, 1, 2, or 3 nucleotides from the sequence of the first strand of a RNAi agent to KRAS selected from the specific duplexes provided herein and listed, e.g., in Table 1.

[0064] In one particular specific embodiment, the present disclosure relates to a composition comprising a RNAi agent comprising a first strand and a second strand, wherein the sequence of the first strand and/or second strand comprise at least 15 contiguous nucleotides, differing by 0, 1, 2, or 3 nucleotides from the sequence of the first and/or second strand of a RNAi agent to KRAS selected from the specific duplexes provided herein and listed, e.g., in Table 1.

[0065] In one particular specific embodiment, the present disclosure relates to a composition comprising a RNAi agent comprising a first strand and a second strand, wherein the sequence of the first strand and/or second strand comprise the sequence of the first and/or second strand, respectively, of a RNAi agent to KRAS selected from the specific duplexes provided herein and listed, e.g., in Table 1.

[0066] In one particular specific embodiment, the present disclosure relates to a composition comprising a RNAi agent comprising a first strand and a second strand, wherein the sequence of the first strand and/or second strand are the sequence of the first and/or second strand, respectively, of a RNAi agent to KRAS selected from the specific duplexes provided herein and listed, e.g., in Table 1.

[0067] Various specific embodiments of these embodiments are described below.

[0068] In one embodiment, the composition further comprises a second RNAi agent to KRAS. In various embodiments, the second RNAi agent is physically separate from the first, or the two are physically connected (e.g., covalently linked or otherwise conjugated).

[0069] In one embodiment, the antisense strand is about 30 or fewer nt in length.

[0070] In one embodiment, the sense strand and the antisense strand form a duplex region of about 15 to about 30 nt pairs in length.

[0071] In one embodiment, the antisense strand is about 15 to about 36 nt in length including about 18 to about 23 nt in length, and including about 19 to about 21 nt in length and about 19 to about 23 nt in length. In one embodiment, the antisense strand has at least the length selected from about 15 nt, about 16 nt, about 17 nt, about 18 nt, about 19 nt, about 20 nt, about 21 nt, about 22 nt, about 23 nt, about 24 nt, about 25 nt, about 26 nt, about 27 nt, about 28 nt, about 29 nt and about 30 nt.

[0072] In one embodiment, the RNAi agent comprises a modification that causes the RNAi agent to have increased stability in a biological sample or environment, e.g., blood serum or intestinal lavage fluid.

[0073] In one embodiment, the RNAi agent comprises at least one sugar backbone modification (e.g., phosphorothioate linkage) and/or at least one 2′-modified nucleotide. In one embodiment, all the pyrimidines are 2′ O-methyl-modified nucleotides.

[0074] In one embodiment, the RNAi agent comprises: at least one 5′-uridine-adenine-3′ (5′-ua-3′) dinucleotide, wherein the uridine is a 2′-modified nucleotide; and/or at least one 5′-uridine-guanine-3′ (5′-ug-3′) dinucleotide, wherein the 5′-uridine is a 2′-modified nucleotide; and/or at least one 5′-cytidine-adenine-3′ (5′-ca-3′) dinucleotide, wherein the 5′-cytidine is a 2′-modified nucleotide; and/or at least one 5′-uridine-uridine-3′ (5′-uu-3′) dinucleotide, wherein the 5′-uridine is a 2′-modified nucleotide.

[0075] In one embodiment, the RNAi agent comprises a 2′-modification selected from the group consisting of: 2′-deoxy, 2′-deoxy-2′-fluoro, 2′-O-methyl, 2′-O-methoxyethyl (2′-O-MOE), 2′-O-aminopropyl (2′-O-AP), 2′-O-dimethylaminoethyl (2′-O-DMAOE), 2′-O-dimethylaminopropyl (2′-O-DMAP), 2′-O-dimethylaminoethyloxyethyl (2′-O-DMAEOE), and 2′-O-N-methylacetamido (2′-O-NMA).

[0076] In one embodiment, the RNAi agent comprises a blunt end.

[0077] In one embodiment, the RNAi agent comprises an overhang having 1 to 4 unpaired nucleotides.

[0078] In one embodiment, the RNAi agent comprises an overhang at the 3′-end of the antisense strand of the RNAi agent.

[0079] In one embodiment, the RNAi agent is ligated to one or more diagnostic compound, reporter group, cross-linking agent, nuclease-resistance conferring moiety, natural or unusual nucleobase, lipophilic molecule, cholesterol, lipid, lectin, steroid, uvaol, hecigenin, diosgenin, terpene, triterpene, sarsasapogenin, Friedelin, epifriedelanol-derivatized lithocholic acid, vitamin, carbohydrate, dextran, pullulan, chitin, chitosan, synthetic carbohydrate, oligo lactate 15-mer, natural polymer, low- or medium-molecular weight polymer, inulin, cyclodextrin, hyaluronic acid, protein, protein-binding agent, integrin-targeting molecule, polycationic, peptide, polyamine, peptide mimic, and/or transferrin.

[0080] In one embodiment, the RNAi agent is capable of inhibiting expression of KRAS by at least about 60% at a concentration of 10 nM in RKO cells in vitro.

[0081] In one embodiment, the RNAi agent is capable of inhibiting expression of KRAS by at least about 70% at a concentration of 10 nM in RKO cells in vitro.

[0082] In one embodiment, the RNAi agent is capable of inhibiting expression of KRAS by at least about 80% at a concentration of 10 nM in RKO cells in vitro.

[0083] In one embodiment, the RNAi agent is capable of inhibiting expression of KRAS by at least about 90% at a concentration of 10 nM in RKO cells in vitro.

[0084] In one embodiment, the RNAi agent has an EC50 of no more than about 0.1 nM in MiaPaca2 cells.

[0085] In one embodiment, the RNAi agent has an EC50 of no more than about 0.01 nM in MiaPaca2 cells.

[0086] In one embodiment, the RNAi agent has an EC50 of no more than about 0.001 nM in MiaPaca2 cells.

[0087] A Method of Treatment Using a RNAi Agent Described Herein

[0088] In one particular specific embodiment, the present disclosure relates to a method of treating a KRAS-related disease in an individual, comprising the step of administering to the individual a therapeutically effective amount of a composition comprising a RNAi agent comprising at least an antisense strand, wherein the antisense strand comprises at least 15 to 19 contiguous nucleotides differing by 0, 1, 2, or 3 nucleotides from the antisense strand of a RNAi agent to KRAS selected from the specific duplexes provided herein and as listed, e.g., in Table 1.

[0089] In another embodiment, the present disclosure relates to such a method, wherein the composition comprising a RNAi agent further comprises a sense strand, wherein the sense strand comprises at least 15 contiguous nucleotides differing by 0, 1, 2, or 3 nucleotides from the sense strand of a RNAi agent to KRAS selected from the specific duplexes provided herein and as listed, e.g., in Table 1.

[0090] In one embodiment of the method, the RNAi agent comprises at least an anti-sense strand, and/or comprises a sense and an anti-sense strand, wherein the sequence of the sense and/or anti-sense strand is the sequence of the sense and/or the anti-sense strand of a RNAi agent to KRAS selected from those specific duplex provided herein and as listed, e.g., in Table 1, wherein the composition further comprises a pharmaceutically effective formulation.

[0091] In one embodiment of the method, the RNAi agent comprises at least an anti-sense strand, and/or comprises a sense and an anti-sense strand, wherein the sequence of the sense and/or anti-sense strand comprises the sequence of the sense and/or the anti-sense strand of a RNAi agent to KRAS selected from those specific duplex provided herein and as listed, e.g., in Table 1, wherein the composition further comprises a pharmaceutically effective formulation.

[0092] Various particular specific embodiments of these embodiments are described below.

[0093] In one embodiment, the KRAS-related disease is a proliferative disease, or cardio-facio-cutaneous (CFC) syndrome or Noonan syndrome.

[0094] In one embodiment, the KRAS-related disease is a proliferative disease, including without limitation a solid or liquid cancer, adenocarcinoma, colorectal cancer, advanced and/or metastatic colorectal cancer, colon cancer, lung, non-small cell lung cancer and lung adenocarcinoma, acute myelogenous lung, bladder, brain, breast, cervical, endometrial, gastric, head and neck, kidney, leukemia, myelodysplastic syndrome, myeloid leukemia, liver, melanoma, ovarian, pancreatic, prostate, testicular, thyroid cancers, or cardio-facio-cutaneous (CFC) syndrome or Noonan syndrome.

[0095] In one embodiment, the method further comprises the administration of an additional treatment. In one embodiment, the additional treatment is a therapeutically effective amount of a composition.

[0096] In one embodiment, the additional treatment is a method (or procedure).

[0097] In one embodiment, the additional treatment and the RNAi agent can be administered in any order, or can be administered simultaneously.

[0098] In one embodiment, the method further comprises the step of administering an additional treatment for a proliferative disease, cardio-facio-cutaneous (CFC) syndrome or Noonan syndrome.

[0099] In one embodiment, the method further comprises the step of administering an additional treatment or therapy selected from the list of an additional antagonist to a KRAS-related disease.

[0100] In one embodiment, the composition comprises a second RNAi agent to KRAS. In various embodiments, the second RNAi agent is physically separate from the first, or the two are physically connected (e.g., covalently linked or otherwise conjugated).

[0101] In one embodiment, the method further comprises the step of administering an additional RNAi agent which comprises at least 15 contiguous nucleotides differing by 0, 1, 2, or 3 nucleotides from the antisense strand of a RNAi agent to KRAS selected from the specific duplexes provided herein and as listed, e.g., in Table 1.

[0102] A Method of Inhibiting the Expression of KRAS Using a RNAi Agent Described Herein

[0103] In one particular specific embodiment, the present disclosure relates to a method of inhibiting the expression of KRAS in an individual, comprising the step of administering to the individual a therapeutically effective amount of a composition comprising a RNAi agent of the present disclosure.

[0104] In one embodiment of the method, the RNAi agent comprises at least an anti-sense strand, and/or comprises a sense and an anti-sense strand, wherein the anti-sense strand comprises at least 15 contiguous nucleotides differing by 0, 1, 2, or 3 nucleotides from the anti-sense strand of a RNAi agent to KRAS selected from those specific duplex provided herein and as listed, e.g., in Table 1.

[0105] In one embodiment of the method, the RNAi agent comprises at least an anti-sense strand, and/or comprises a sense and an anti-sense strand, wherein the sequence of the sense and/or anti-sense strand is the sequence of the sense and/or the anti-sense strand of a RNAi agent to KRAS selected from those specific duplex provided herein and as listed, e.g., in Table 1, wherein the composition is in a pharmaceutically effective formulation.

[0106] In one embodiment of the method, the RNAi agent comprises at least an anti-sense strand, and/or comprises a sense and an anti-sense strand, wherein the sequence of the sense and/or anti-sense strand comprises the sequence of the sense and/or the anti-sense strand of a RNAi agent to KRAS selected from those specific duplex provided herein and as listed, e.g., in Table 1, wherein the composition is in a pharmaceutically effective formulation.

[0107] Various particular embodiments of these embodiments are described below.

[0108] In one embodiment, the individual is afflicted with or susceptible to a KRAS-related disease.

[0109] In one embodiment, the KRAS-related disease is a proliferative disease, or cardio-facio-cutaneous (CFC) syndrome or Noonan syndrome.

[0110] In one embodiment, the KRAS-related disease is a proliferative disease, including without limitation a solid or liquid cancer, e.g., adenocarcinoma, colorectal cancer, advanced and/or metastatic colorectal cancer, colon cancer, lung, non-small cell lung cancer and lung adenocarcinoma, acute myelogenous lung, bladder, brain, breast, cervical, endometrial, gastric, head and neck, kidney, leukemia, myelodysplastic syndrome, myeloid leukemia, liver, melanoma, ovarian, pancreatic, prostate, testicular, thyroid cancers, or cardio-facio-cutaneous (CFC) syndrome or Noonan syndrome.

[0111] In one embodiment, the method further comprises the administration of an additional treatment. In one embodiment, the additional treatment is a therapeutically effective amount of a composition. In one embodiment, the additional treatment is a therapeutically relevant method (or procedure).

[0112] In one embodiment, the additional treatment and the RNAi agent can be administered in any order or can be administered simultaneously.

[0113] In one embodiment, the method further comprises the step of administering an additional treatment for a proliferative disease, cardio-facio-cutaneous (CFC) syndrome or Noonan syndrome.

[0114] In one embodiment, the composition comprises a second RNAi agent to KRAS. In various embodiments, the second RNAi agent is physically separate from the first, or the two are physically connected (e.g., covalently linked or otherwise conjugated).

[0115] In one embodiment, the method further comprises the step of administering an additional RNAi agent which comprises at least 15 contiguous nucleotides differing by 0, 1, 2, or 3 nucleotides from the antisense strand of a RNAi agent to KRAS selected from the specific duplexes provided herein and as listed, e.g., in Table 1.

[0116] Pharmaceutical Compositions of a RNAi Agent to KRAS

[0117] In one particular specific embodiment, the present disclosure relates to a composition comprising a RNAi agent of the present disclosure. In one embodiment, the RNAi agent comprises at least an anti-sense strand, and/or comprises a sense and an anti-sense strand, wherein the anti-sense strand comprises at least 15 contiguous nucleotides differing by 0, 1, 2, or 3 nucleotides from the anti-sense strand of a RNAi agent to KRAS selected from those specific duplex provided herein and as listed, e.g., in Table 1, wherein the composition is in a pharmaceutically effective formulation.

[0118] In one embodiment, the RNAi agent comprises at least an anti-sense strand, and/or comprises a sense and an anti-sense strand, wherein the sequence of the sense and/or anti-sense strand is the sequence of the sense and/or the anti-sense strand of a RNAi agent to KRAS selected from those specific duplex provided herein and as listed, e.g., in Table 1, wherein the composition is in a pharmaceutically effective formulation.

[0119] In one embodiment, the RNAi agent comprises at least an anti-sense strand, and/or comprises a sense and an anti-sense strand, wherein the sequence of the sense and/or anti-sense strand comprises the sequence of the sense and/or the anti-sense strand of a RNAi agent to KRAS selected from those specific duplex provided herein and as listed, e.g., in Table 1, wherein the composition is in a pharmaceutically effective formulation.

[0120] In one embodiment, the present disclosure pertains to the use of a RNAi agent in the manufacture of a medicament for treatment of a KRAS-related disease, wherein the RNAi agent comprises a sense strand and an antisense strand, wherein the antisense strand comprises at least 15 contiguous nucleotides differing by 0, 1, 2, or 3 nucleotides from the antisense strand of a RNAi agent to KRAS selected from those specific duplex provided herein and as listed, e.g., in Table 1.

[0121] Specific Embodiments of RNAi Agents to KRAS comprising mismatches from the disclosed sequences

[0122] Various specific embodiments of a RNAi agent to KRAS are disclosed herein. The present disclosure encompasses the example modified sequences provided in Tables 1 to 6, and the corresponding unmodified sequences and other modified sequences (e.g., modified and unmodified variants). Specific embodiments of the present disclosure include RNAi agents which comprise sequences differing by 0, 1, 2, or 3 nt (nucleotides) or by [basepair(s)] (e.g., with 0, 1, 2 or 3 mismatches) from any of the RNAi agents listed in Table 1, and modified and unmodified variants thereof. As described in additional detail below, a mismatch is defined herein as a difference between the base sequence (e.g., A instead of G) or length when two sequences are maximally aligned and compared. In addition, as described in more detail below, an “unmodified variant” is a variant in which the base sequence is identical, but none of the bases are modified; this includes, for example, a sequence identical to the corresponding portion of the wild-type KRAS mRNA or gene. A “modified variant” contains one or more modifications (or one or more fewer or different modifications) to a nucleotide, sugar, phosphate or backbone, and/or addition of one or more moieties; but without a change, substitution, addition, or deletion to the base sequence. A particular sequence and its modified or unmodified variants have 0 mismatches among them.

[0123] In one particular embodiment, the present disclosure comprises a RNAi agent comprising a sense and an anti-sense strand, wherein the sense and/or anti-sense strand comprises at least 15 contiguous nucleotides differing by 0, 1, 2, or 3 nt from the sequence of the sense and/or anti-sense strand of: any of the RNAi agents listed in Tables 1 to 6, and modified and unmodified variants thereof.

[0124] In another particular embodiment, the RNAi agent comprises a sense strand comprising at least 15 contiguous nucleotides differing by 0, 1, 2, or 3 nt from the sense strand of any of the RNAi agents listed in Tables 1 to 6, and modified and unmodified variants thereof.

### OTHER EMBODIMENTS

[0125] Various particular specific embodiments of this disclosure are described below.

[0126] In one embodiment, the disclosure pertains to a composition according to any of the embodiments described herein, for use in a method of treating a KRAS-related disease in an individual, the method comprising the step of administering to the individual a therapeutically effective amount of a composition according to any of the claims.

[0127] One embodiment of the disclosure is the use of a composition according to any of these embodiments, in the manufacture of a medicament for treatment of an KRAS-related disease.

[0128] In one embodiment, the KRAS-related disease is a proliferative disease, or cardio-facio-cutaneous (CFC) syndrome or Noonan syndrome.

[0129] In one embodiment, the KRAS-related disease is a proliferative disease, including without limitation a solid or liquid cancer, adenocarcinoma, colorectal cancer, advanced and/or metastatic colorectal cancer, colon cancer, lung, non-small cell lung cancer and lung adenocarcinoma, acute myelogenous lung, bladder, brain, breast, cervical, endometrial, gastric, head and neck, kidney, leukemia, myelodysplastic syndrome, myeloid leukemia, liver, melanoma, ovarian, pancreatic, prostate, testicular, thyroid cancers, or cardio-facio-cutaneous (CFC) syndrome or Noonan syndrome.

[0130] In one embodiment, the disclosure pertains to the composition of any of the above embodiments, for use in the treatment of an KRAS-related disease.

### DEFINITIONS

[0131] For convenience, the meaning of certain terms and phrases used in the specification, examples, and appended claims, are provided below. If there is an apparent discrepancy between the usage of a term in other parts of this specification and its definition provided in this section, the definition in this section shall prevail.

[0132] KRAS

[0133] By “KRAS” is meant the gene, mRNA, and/or protein, or any nucleic acid encoding the protein, or any mutant, variant or modified version thereof, designated by the Approved Gene Symbol: KRAS; Cytogenetic location: 12p 12.1; Genomic coordinates (GRCh37): 12:25,358,179-25,403,853 (from NCBI), which also variously designated: KRas, K-ras, K-RAS, GTPase KRas, and V-Ki-ras2 Kirsten rat sarcoma viral oncogene homolog, C-K-RAS; K-RAS2A; K-RAS2B; K-RAS4A; K-RAS4B; KI-RAS; KRAS2; RASK2; v-Ki-ras2 Kirsten rat sarcoma viral oncogene homolog [Source: MGI Symbol; Acc: MGI: 96680]; OMIM: 190070 MGI: 96680 HomoloGene: 37990 GeneCards: KRAS Gene; Species Human: Entrez 3845; Ensembl ENSG00000133703; UniProt P01116; RefSeq (mRNA) NM_{—}004985.3; RefSeq (protein) NP_{—}004976.2; Location (UCSC) Chr 12: 25.36-25.4 Mb; Species-Mouse: Entrez-16653; Ensembl-ENSMUSG00000030265; UniProt-070564; RefSeq (mRNA)-NM_{—}021284.6; RefSeq (protein)-NP_{—}067259.4; Location (UCSC)-Chr 6: 145.17-145.2 Mb.

[0134] The Ras Subfamily

[0135] The Ras subfamily (an abbreviation of RAt Sarcoma) is a protein subfamily of small GTPases that are involved in cellular signal transduction and other processes. Activation of Ras signaling causes cell growth, differentiation and survival.

[0136] Since Ras communicates signals from outside the cell to the nucleus, mutations in ras genes can cause permanent activation and inappropriate transmission inside the cell, even in the absence of extracellular signals. Because these signals result in cell growth and division, dysregulated or otherwise aberrant Ras signaling can ultimately lead to oncogenesis and cancer. Goodsell et al. 1999. Oncologist 4. 3: 263-4. Activating mutations in Ras are found in a third of all human tumors and up to 90% in specific tumor types. Downward. 2003. Nat. Rev. Cancer 3. 1: 11-22; Bos et al. 1989 Cancer Res. 49: 4682-4689; and Forbes et al. 2006 Br. J. Cancer 94: 318-322

[0137] The ras genes were first identified as the transforming oncogenes [Malumbres et al. 2003. Nat. Rev. Cancer 3. 6: 459-65] responsible for the cancer-causing activities of the Harvey (the HRAS oncogene) and Kirsten (KRAS) sarcoma viruses, by Scolnick and colleagues at the National Institutes of Health (NIH). Chang et al. 1982. Proc. Natl. Acad. Sci. U.S.A. 79. 16: 4848-52. These viruses were discovered originally in rats during the 1960s by Jennifer Harvey [Harvey. 1964. Nature 204. 4963: 1104-5] and Werner Kirsten [Kirsten et al. 1970. Bibl Haematol. 36: 246-9], respectively. In 1982, activated and transforming human KRAS genes were discovered in human cancer cells [Santos et al. 1982. Nature 298. 5872: 343-7], [Parada et al. 1982. Nature 297. 5866: 474-8]. Subsequent studies identified a third human KRAS gene, designated NRAS, for its initial identification in human neuroblastoma cells.

[0138] The three human KRAS genes encode highly related 188 to 189 amino acid proteins, designated H-Ras, N-Ras and K-Ras4A and K-Ras4B (the two K-Ras proteins arise from alternative gene splicing). For additional information pertaining to KRAS cloning and isoforms, see, for example, Der et al. 1982 Proc. Nat. Acad. Sci. 79: 3637-3640; Chang et al. 1982 Proc. Nat. Acad. Sci. 79: 4848-4852; McCoy et al. 1983 Nature 302: 79-81; McGrath et al. 1983 Nature 304: 501-506; and Carta et al. 2006 Am. J. Hum. Genet. 79: 129-135.

[0139] Ras Function

[0140] Ras proteins function as binary molecular switches that control intracellular signaling networks. Ras-regulated signal pathways, control such processes as actin cytoskeletal integrity, proliferation, differentiation, cell adhesion, apoptosis, and cell migration. Ras and ras-related proteins are often deregulated in cancers, leading to increased invasion and metastasis and decreased apoptosis.

[0141] Ras activates several pathways, of which the mitogen-activated protein (MAP) kinase cascade has been well-studied. This cascade transmits signals downstream and results in the transcription of genes involved in cell growth and division. There is a separate AKT pathway that inhibits apoptosis.

[0142] In various embodiments, the RNAi agents can be used to treat KRAS-related diseases in which any one or more of these pathways or functions is altered. In various embodiments, the present disclosure encompasses KRAS RNAi agents that modulate or alter Ras-regulated signal pathways, including the MAP kinase cascade, and/or modulate or alter processes such as actin cytoskeletal integrity, proliferation, differentiation, cell adhesion, apoptosis, and cell migration. Ras and ras-related proteins are often deregulated in cancers, leading to increased invasion and metastasis and decreased apoptosis.

[0143] Activation and Deactivation

[0144] Ras is a G protein, or a guanosine-nucleotide-binding protein. Specifically, it is a single-subunit small GTPase, which is related in structure to the G_{α} subunit of heterotrimeric G proteins (large GTPases). G proteins function as binary signaling switches with “on” and “off” states. In the “off” state it is bound to the nucleotide guanosine diphosphate (GDP), while in the “on” state, Ras is bound to guanosine triphosphate (GTP), which has an extra phosphate group as compared to GDP. This extra phosphate holds the two switch regions in a “loaded-spring” configuration (specifically the Thr-35 and Gly-60). When released, the switch regions relax which causes a conformational change into the inactivate state. Hence, activation and deactivation of Ras and other small G proteins are controlled by cycling between the active GTP-bound and inactive GDP-bound forms.

[0145] Critical regions of KRAS for oncogenic activity include codons 12, 13, 59, 60, 61, 63 and 153. Grimmond et al. 1992 Urol. Res. 20:121-126; Burmer et al. 1989 Proc. Natl. Acad. Sci. 86: 2403-2407. Mutations sometimes appear affecting these codons. Some KRAS mutations cause RAS to accumulate in the GTP-bound state by impairing intrinsic GTPase activity and conferring resistance to GTPase-activating proteins. Zenker et al. 2007 J. Med. Genet. 44: 131-135. In various embodiments, the sequence of the KRAS RNAi agent encompasses the portion of the coding segment corresponding to any of the above-listed codons. In various embodiments, the KRAS RNAi agent has a mismatch to the wild-type (wt) KRAS sequence, such that the sequence of the KRAS RNAi agent matches the sequence of a mutated portion of the KRAS gene. In various embodiments, the disclosure encompasses the administration to a patient of a KRAS RNAi agent with a sequence corresponding to that of a particular mutation found in the patient, optionally combined with the administration of a KRAS RNAi agent with a sequence encompassing the wt sequence. In some embodiments, the KRAS RNAi agents correspond to different portions of the KRAS mRNA. In some embodiments, the patient may have one or more mutations corresponding to particular codons of KRAS (e.g., codons 12, 13 and/or 59), but the remainder of the KRAS gene is wild type, and thus the patient can be administered a KRAS RNAi agent with a wild-type sequence which does not span the mutation, and/or administered a KRAS RNAi agent with a sequence corresponding to the one or more mutations.

[0146] In some embodiments, the disclosure encompasses a method involving the steps of identifying a patient with a KRAS-related disease, isolating a nucleic acid encoding or corresponding to the KRAS protein or gene from the patient, determining the sequence of the nucleic acid to determine if there is a mutation in the KRAS gene, and, if the sequence indicates a mutation in KRAS, producing a KRAS RNAi agent with a sequence which corresponds to the mutation, and administering the KRAS RNAi agent in a therapeutically effective amount to treat or ameliorate the KRAS-related disease. In some embodiments, the KRAS RNAi agent is administered along with or as part of a treatment regimen with another disease treatment appropriate to the KRAS-related disease.

[0147] The process of RAS exchanging the bound nucleotide is facilitated by guanine nucleotide exchange factors (GEFs) and GTPase activating proteins (GAPs). As per its classification, Ras has an intrinsic GTPase activity, which means that the protein on its own will hydrolyze a bound GTP molecule into GDP. However this process is too slow for efficient function, and hence the GAP for Ras, RasGAP, may bind to and stabilize the catalytic machinery of Ras, supplying additional catalytic residues (“arginine finger”) such that a water molecule is optimally positioned for nucleophilic attack on the gamma-phosphate of GTP. An inorganic phosphate is released and the Ras molecule is now bound to a GDP. Since the GDP-bound form is “off” or “inactive” for signaling, GTPase Activating Protein inactivates Ras by activating its GTPase activity. Thus, GAPs accelerate Ras inactivation.

[0148] GEFs catalyze a “push and pull” reaction which releases GDP from Ras. They insert close to the P-loop and magnesium cation binding site and inhibit the interaction of these with the gamma phosphate anion. Acidic (negative) residues in switch II “pull” a lysine in the P-loop away from the GDP, which “pushes” switch I away from the guanine. The contacts holding GDP in place are broken and it is released into the cytoplasm. Because intracellular GTP is abundant relative to GDP (approximately 10 fold more). GTP predominantly re-enters the nucleotide binding pocket of Ras and reloads the spring. Thus GEFs facilitate Ras activation. Well known GEFs include Son of Sevenless (Sos) and cdc25 which include the RasGEF domain.

[0149] The balance between GEF and GAP activity determines the guanine nucleotide status of Ras, thereby regulating Ras activity.

[0150] In the GTP-bound conformation, Ras has high affinity for numerous effectors which allow it to carry out its functions. These include PI3K. Other small GTPases may bind adaptors such as arfaptin or second messenger systems such as adenylyl cyclase. The Ras binding domain is found in many effectors and invariably binds to one of the switch regions, because these change conformation between the active and inactive forms. However, they may also bind to the rest of the protein surface.

[0151] In various embodiments, the present disclosure encompasses KRAS RNAi agents that modulate the amount of KRAS and/or the amount of activated KRAS in a cell. In various other embodiments, the present disclosure encompasses a composition or pharmaceutical composition comprising and/or a method of treatment involving one or more KRAS RNAi agents and a second agent (e.g., another RNAi agent, antibody, or small molecule) which targets a factor which interacts with KRAS (e.g., PI3K, GAP, etc.).

[0152] Ras in Cancer

[0153] Mutations in the Ras family of proto-oncogenes are very common. A pharmacological approach that curtails Ras activity can inhibit certain cancer types. Ras point mutations are the single most common abnormality of human proto-oncogenes. Pathologic Basis of Disease 8th ed. 2010. p. 282. Ras inhibitor trans-farnesylthiosalicylic acid (FTS, Salirasib) exhibits profound anti-oncogenic effects in many cancer cell lines. Rotblat et al. 2008. Methods Enzymol 439: 467-89; and Blum et al. 2005. Cancer Research 65. 3: 999-1006.

[0154] In various embodiments, KRAS RNAi agents disclosed herein can be introduced into tumor cells with a point mutation in KRAS or other mutation causing an over-expression or hyper-activity of KRAS. Such cells are termed “KRAS-defective” cells.

[0155] Inappropriate activation of the gene has been shown to play a key role in signal transduction, proliferation and malignant transformation. Lodish et al. 2000. Chapter 25. Cancer. Molecular cell biology. 4th ed. San Francisco: W.H. Freeman.

[0156] Mutations in a number of different genes as well as KRAS itself can also have this effect. Oncogenes such as p210BCR-ABL or the growth receptor erbB are upstream of Ras, so if they are constitutively activated their signals will transduce through Ras.

[0157] The tumour suppressor gene NF1 encodes a Ras-GAP—its mutation in neurofibromatosis will mean that Ras is less likely to be inactivated. RNAi agents targeting KRAS can thus be used in conjunction with other agents (e.g., other RNAi agents) which target other factors which effect KRAS and its various pathways.

[0158] Finally, Ras oncogenes can be activated by point mutations so that the GTPase reaction can no longer be stimulated by GAP—this increases the half life of active Ras-GTP mutants.

[0159] In various embodiments, the KRAS RNAi agent can be administered to patients having a KRAS-related diseases involving a mutation outside KRAS, such as in p210BCR-ABL, erbB, or NF1. In various other embodiments, the present disclosure encompasses a composition or pharmaceutical composition or treatment method involving both one or more KRAS RNAi agents and one or more agents (e.g., a RNAi agent, antibody or small molecule) which targets another factor which causes inappropriate activation of KRAS, such as in p210BCR-ABL, erbB, or NF1.

[0160] Constitutively Active Ras

[0161] Constitutively active Ras (Ras^{D}) is one which contains mutations that prevent GTP hydrolysis, thus locking Ras in a permanently ‘On’ state.

[0162] The most common mutations are found at residue G12 in the P-loop and the catalytic residue Q61.

[0163] The glycine to valine mutation at residue 12 renders the GTPase domain of Ras insensitive to inactivation by GAP and thus stuck in the “on state”. Ras requires a GAP for inactivation as it is a relatively poor catalyst on its own, as opposed to other G-domain-containing proteins such as the alpha subunit of heterotrimeric G proteins.

[0164] Residue 61 is responsible for stabilizing the transition state for GTP hydrolysis. Because enzyme catalysis in general is achieved by lowering the energy barrier between substrate and product, mutation of Q61 to K necessarily reduces the rate of intrinsic Ras GTP hydrolysis to physiologically meaningless levels.

[0165] In various embodiments, the present disclosure pertains to a method of treatment of a patient having or susceptible to a KRAS-related disease, wherein the KRAS is constitutively active.

[0166] KRAS Sequences in Various Species

[0167] The sequence of KRAS gene has determined for various species, including Human (HGNC: 6407; NM_{—}004985.3); Mouse (MGI:96680); and Rat (RGD:2981). A RNAi agent specific to KRAS can be designed such that the sequence thereof completely matches that of the mRNA corresponding to the human KRAS gene and the homologous gene from a test animal. This is advantageous when developing a therapeutic RNAi agent since the same RNAi agent can be used in both a test animal (e.g., rat, mouse, or cynomolgus monkey, etc.) and a human.

[0168] The KRAS sequence in cynomolgus monkey (Macaca fascicularis, or “cyno”) has been partially determined. Shown below are the partial cyno sequence and comparisons beween portions of the cyno and human KRAS sequences. NM_{—}004985 KRAS, v-Ki-ras2 Kirsten rat sarcoma viral oncogene homolog consensus—target length=5312, consensus length=4474, 23 contigs (longest is 775) 113 mismatches, 1651.87410068346 reads, coverage: max=96, mean=13.158; consensus consistency=99.41%, target/consensus conservation 97.47%.

[0169] KRAS Cynomolgus Sequence:

| [SEQ ID NO: 1709] | |
|---|---|
| NNNNNNNNNN NNNNNNNNNN NNNNNNNNNN NNNNNNNNNN NNNNNNNNNN NNNNNNNNNN | 60 |
| NNNNNNNNNN NNNNNNNNNN NNNNNNNNNN NNNNNNNNNN NNNNNNNNNN NNAGGCACTG | 120 |
| AAGGCGGCGG CGGGGCCAGA GGCTCAGCGG CTCCCCGGGG CGGGAGAGAG NNNNNNNNNN | 180 |
| NNNNNNNNNN NNNNNNNNNN NNNNAGTTGG AGCTGGTGGG GTAGGCAAGA GTGCCTTGAC | 240 |
| NNNNNNGCTA ATTCAGAATC ATTTTGTGGA CGAATATGAT CCAACAATAG AGGATTCCTA | 300 |
| CAGGAAGCAA GTAGTAATTG ATGGAGAAAC CTGTCTCTTG GATATTCTCG ACACAGCAGG | 360 |
| TCAAGAGGAG TACAGTGCAA TGAGGGACCA GTACATGAGG ACTGGGGAGG GCTTTCTTTG | 420 |
| TGTATTTGCC ATAAATAATA CTAAATCATT TGAAGATATT CACCATTATA GAGAACAAAT | 480 |
| TAAAAGAGTT AAGGACTCTG AAGATGTACC TATGGTCCTA GTAGGAAATA AATGTGATTT | 540 |
| GCCTTCTAGA ACAGTAGACA CAAAACAGGC TCAGGACTTA GCAAGAAGTT ACGGAATTCC | 600 |
| TTTTATTGAA ACATCAGCAA AGACAAGACA GGGTGTTGAT GATGCCTTCT ATACATTAGT | 660 |
| TCGAGAAATT CGAAAACATA AAGAAAAGAT GAGCAAAGAT GGTAAAAAGA AGAAAAAGAA | 720 |
| GTCAAAGACA AAGTGTGTAA TTATGTAAAT ACAATTTGTA CTTTTTTCTT AAGGCATACT | 780 |
| AGTAAAAGTG GTAATTTTTG TACATTACAC TAAATTATTA GCATTTGTTT TAGCATTACC | 840 |
| TAATTTTTTT CCTGCTCCAT GCAGACTGTT AGCTTTTACC TTAAATGCTT ATTTTAAAAT | 900 |
| GACAGTGGAA GCTTTTTTTT CCTCTAAGTG CCAGTATTCC CAGAGTTTTG ATTTTTGAAC | 960 |
| TAGCAATGCC TGTGAAAAAG AAACTGAATA CCTAAGATTT CTGTCTTGGG GTTTTTGGTG | 1020 |
| CNNNNNNNNN NNNNNNNNNN NNNNNNNNNN NNNNNNNNNN NNNNNNNNNN NNNNNNAATT | 1080 |
| AATGAAGCTT CTGAATCATC CCTATTCTGT GTTTTATCTA GTCACATAAA TGGATTAATT | 1140 |
| ACTAATTTCA GTTGAGACCT TCTAATTGGT TTTTACTGAA ACATTGAGGG AACACAAANN | 1200 |
| NNNNNNNNNN NNNNNNNNNN NNNNTCTAGG CATCATGTCC TATAGTTTGT CATCCCTGAT | 1260 |
| GAATGTAAAG TTACACTGTT CACAAAGGTT TTGTTCCCTT TCCACTGCTA TTAGTCATGG | 1320 |
| TCACTCTCCC CGNNNNNNNN NNNNNNNNNN NNNNNNNNNN NNNNNTGGAA AAAAATTACA | 1380 |
| AGTCAATGGA AACTATTATA AGGCCGTTTC CTTTTCACAT TAGATAAATT ACTATAAAGA | 1440 |
| CTCCTAATAG CTTTTCCTGT TAAGGCAGAC CCAGTATGAA ATGGGGATTN NNNNNNNNNN | 1500 |
| NNNNNNNNNN NNNNNNNNNN NNNNNNNNNA ATTTTTATAA TAATTGAAAT AATTTTAACA | 1560 |
| TGTATAAAAA ATTCTCATAG GAATTAAATG TAGTCTCCCT GTGTCAGATT GCTCTTTCAT | 1620 |
| AGTATAACTT TAAATCTTTT CTTCAACTTC AGTCTTTGAA GGTAGTTTTA ATTCTGCTTG | 1680 |
| TGACATTAAA AGATTATTTG GGCCAGTTAT AGCTTAGTAG GTGTTGAAGA GACCAAGGTT | 1740 |
| GCATGGCCAG GCCCTGTGTG AACCTTTGAG CTTTCATAGA GAGTTTCACA GCATGGACTG | 1800 |
| TGTCCCCATG GTCATCCAGT GTTGTCATGC ATTGGTTAGT CAAAATGGGG AGGGACTAGG | 1860 |
| ACAGTTTGGA TAGGTCAACA AGATACATTC TCACTCTGTG GTGGTCCTGC TGACAAATCA | 1920 |
| AGAGCATTGC TTTTGTTTTT TAAGAAAATG AACTCTTTTT TAAAAATTAC TTTTAAATAT | 1980 |
| TAACTCAAAA GTTGAGATTT TGGGGGGGTG GTATGCCAAG ACATTAATTT TTTTNNNNNN | 2040 |
| NNNNNNNNNN NNNAAGTTTT ACAATCTCTA GGTTTGGCTA GTTCTCTTAA CACTGGTTAA | 2100 |
| ATTAACATTT CATAAACACT TTTCAAGNNN NNNNNNNNNN NNNNNNNNNN NNNNNNNNNN | 2160 |
| NNNNNNNNNN NNNNNNNNNN NNNATTTAAA ATGTTACTTA TTTTAAAATA TATGAAATGA | 2220 |
| GATGGCATGG TGAGGTGAAA GTATCACTGG ACTANNAAGA AGGTGACTTA GGTTCTAGAT | 2280 |
| AGTTGTCTTT TAGGACTCTG ATTTTGAGGA CATCACTTAC TATCCATTTC TTCATGTTAA | 2340 |
| NNNNNNNNNN NNNNNNNNNN NNNNNNNNNN TTTTTACAAC TATGTGATTT ATATTCCGTT | 2400 |
| TACATGAGGA TACACTTATT TGTCAAGCTC AGCACAATCT AAAAATTTTT AACCTATGTT | 2460 |
| ACACCATCTT CAGTGCCAAT CTTGGGCAAA ATTGTGCAAG AGGTGAAGTT TATATTTGAA | 2520 |
| TATCCATTCT CGTTTTAGGA CTCTCCTTCC ATGTTAGTGT CATCTTGCCT GCCTACCTTC | 2580 |
| CACATGCCCC ATGACTTGAT GCAGTTTTAA TACTTCTAAT TCCCCTAACC ATAAGATTTA | 2640 |
| CTGCTGCTAT GGATATCTCC ATGAAGTTTT CCCNNNNNNN NNNNNNNNNN NNNNNNNNNN | 2700 |
| NNNNNNNNNN NNNNNNNNNN NGAGAATCTG ACAGATACCA TAATGGGATT TGACCTAATC | 2760 |
| ACTAATTTTC AGGTGGTGGC CGATCCTTTG AAAATATCTC TGCTGCCCAA TCCATTAGCG | 2820 |
| ACAGTAGGAT TTTTCAGACC TGGTATGAAT AGACAGAACC CTATCCAGTG GAAGGAGAAT | 2880 |
| TTAATAAAGA TAGTACTGAA ATAATTCCTA AGGTAATCTA CAACTAGGAC TACTCCTGGT | 2940 |
| AACAGTAATA CATTCCATTG TTTTAGTAAC CAGAAATNNN NNNNNNNNNN NNNNNNNNNN | 3000 |
| NNNNNNNNNN NNNNNNNNNN NNNNNNNNNN NNNNNNNNNN NNNNNNNNNN NNCCAGGCTG | 3060 |
| GAATGCAGTG GCGCCATCTC AGCTCACTGC AACCTCCATC TCCCAGGTTC AAGCGATTCT | 3120 |
| CGTGCCTCGG CATCCTGAGT AGCTGGGATT ACAGGCATGT GCCNCCACAC TCAACTAATT | 3180 |
| TTTGTAGTTT TAGGAGAGAC AGGGTTTCAC CCTATTGGCC AGGCTGGTCT CGAACTCCTG | 3240 |
| ACCTCAAGTG ATTCACCCAC CTNNNCCTCA TAAAGCCGTT TTGCAGAACT CATTTATTCA | 3300 |
| GCAAATATTT ATTGAGTGCC TACCAGATGC CAGTCATTTC ACAAGGCACT GGGTATATGG | 3360 |
| TATCCCCAAA CAAGAGACAT AATCCTGGTC CTTAGCTAGT GCTAGCNNNN NNNNNNNNNN | 3420 |
| NNNNNNNNNN NNNNNNNNNN NNNNNNNNNN NNNNNNNNNN NNNNNNNNNN NNNNNNNNNN | 3480 |
| NNNNGGGGTT TGGTCCCTGT GCCTGCTCTA TAATTGTTTT GCTATGATTC CAGTGAAANN | 3540 |
| NNNNNNNNNN NNNNNNNNNN NNNNNNNNNN NNNNNNNNNN NNNNNNNNNN NNNNNNNNNN | 3600 |
| NNNNNNNNNN NNNNNNNNNN NNNNNNNNNN NNNNNNNNNN NNTTACTGTA CACATTAAGG | 3660 |
| TGTATGTCAG ATATCCATAT TGAANNNNNN NNNNNNNNNN NNNNNNNNNN NNNNNNNNAT | 3720 |
| AATTAAAATA TACTTAAAAA TTAATAGTTT TATCTGGGTA CAAACAAACA GGTGCCTGAA | 3780 |
| CTAGTTCACA GACAAGGAAA CTTCTATGTA AAAATCAGTA TGATTTNNNN NNNNNNNNGT | 3840 |
| GAAACTACAG ATCTTTGGAA CATTGTTTAG ATAGGGTGTT AAGACTTACA CAGTACCACG | 3900 |
| TTTCTACACA CAGAAAGAAA TGGCCATACT TCAGGAACTG CAGTGCTAAT GAGGGGATAT | 3960 |
| TTAGGCCTCT TGAATTTTTG ATGTAGATGG GCATTTTTTT AAGGTANNTG GTAATTACCT | 4020 |
| TTATGTGAAC TTTGAATGGT TTAACAAAAG ATTTGTTTTT GTAGAGATTT TAAAGGGGGA | 4080 |
| GAATGCTAGA AATAAATGTT ATCTAANNNN NNNCGCCTTA AAGATAAAAA TCCTTGTTGA | 4140 |
| AGTTTTTTAA AAAAAAGCTA AATTACATAG TCTTAGGCAT TAACATGTTT GTGGAAGAAT | 4200 |
| ATAGCACACA TATATTGTAT CATTTGAGTG AATATTCCCA AATAGGCATT CTAGGCTCTA | 4260 |
| TTTAACTGAG TCACACTGCA TAGGAATTTA GAACCTAACT TTTATAGGTT ATCAAAACTG | 4320 |
| TTGCCTCCAT TGCACAATTT TGTCCTAATA CATACATGGA GACTTTGTGG GGCATGTTAA | 4380 |
| GTTACAGTTT GCACAAGTTC ATCTCATTTG TATTCCATTG ATTTTTTTTT TCTTCTAAAC | 4440 |
| ATTTTTTCTT CAAACAGTAT ATAACTTTTT TTAGGGGATT TTTTTTNNNN NNNNNNNNNN | 4500 |
| NNTCTGACGA TTTCCATTTG TCAAAAAGTA ATGATTTCTT GATAATTATG TAGTAATGTT | 4560 |
| TTTAAGAACC CAGCAGTTAC CTTAAAGCTG AATTTATATT TAATAACTTC TGTGTTAATA | 4620 |
| CTGGATAGCA TGAATTCTGC ATTGAGAAAC TGAATAGNNN NNNNNNNNNN NNNNNNNNNN | 4680 |
| NNNNNNNNNN NNNNNNNNCA TGAGTTCTTG AAGAATAGTC ATAACTAGAT TAAGATCTGT | 4740 |
| GTTTTAGTTT AATAGTTTGA AGTGCCTGTT TGGGATAATG ATAGGTAATT TAGATGAATT | 4800 |
| TAGGGGGAAA AAAAGTTATC TGCAGAAATG TTGAGGGCCC ATCTCTCCCC ACACACCCAC | 4860 |
| ATAGAGCTAA CTGGGTTACA GTGTTTTATC CGAAAGTTTC CAATTCCACT GTCTTGTGTT | 4920 |
| TTCATGTTGA AAATACTTTT GCATTTTTCC TTTGAGTGCC AATTTCTTAC TAGTACTATT | 4980 |
| TCTTAATGTA ACATGTTTAC CTGGAATGTA TTTTAACTAT TTTTGTATAG TGTAAACTGA | 5040 |
| AACATGCACA TTTTGTACAT TGTGCTTTCT TTTGTGGGAC ATATGCAGTG TGATCCAGTT | 5100 |
| GTTTTCCATC ATTTGGTTGC GCTGACCTAG GAATGTTGGT CATATCAAAC ATTAAAAATG | 5160 |
| ACCACTCTTT TAATTGAAAT TAACTTTTAA ATGTTTATAG GAGTATGTGC TGTGAAGTGA | 5220 |
| TCTAAAATTT GTAATATTTT TGTCATGAAC TGTACTACTC CTAATTATTG TAATGTAATA | 5280 |
| AAAATAGTTA CAGTGACAAA AAAAAAAANN NN. | 5312 |

[0170] Comparisons between portions of the human sequence and the cyno sequence are presented below.

| | | | |
|---|---|---|---|
| Human | 113 | AGGCACTGAAGGCGGCGGCGGGGCCAGAGGCTCAGCGGCTCCCAGGTGCGGGAGAGAGGC | 172 |
| | | \|\|\|\|\|\|\|\|\|\|\|\|\|\|\|\|\|\|\|\|\|\|\|\|\|\|\|\|\|\|\|\|\|\|\|\|\|\|\|\|\|\|\| \|\| \|\|\|\|\|\|\|\|\|\|\| | |
| Cyno | 113 | AGGCACTGAAGGCGGCGGCGGGGCCAGAGGCTCAGCGGCTCCCCGGGGCGGGAGAGAGNN | 172 |
| Human | 173 | CTGCTGAAAATGACTGAATATAAACTTGTGGTAGTTGGAGCTGGTGGCGTAGGCAAGAGT | 232 |
| | | \|\|\|\|\|\|\|\|\|\|\|\|\|\|\| \|\|\|\|\|\|\|\|\|\|\|\| | |
| Cyno | 173 | NNNNNNNNNNNNNNNNNNNNNNNNNNNNNNNNAGTTGGAGCTGGTGGGGTAGGCAAGAGT | 232 |
| Human | 233 | GCCTTGACGATACAGCTAATTCAGAATCATTTTGTGGACGAATATGATCCAACAATAGAG | 292 |
| | | \|\|\|\|\|\|\|\| \|\|\|\|\|\|\|\|\|\|\|\|\|\|\|\|\|\|\|\|\|\|\|\|\|\|\|\|\|\|\|\|\|\|\|\|\|\|\|\|\|\|\|\|\|\| | |
| Cyno | 233 | GCCTTGACNNNNNNGCTAATTCAGAATCATTTTGTGGACGAATATGATCCAACAATAGAG | 292 |
| Human | 293 | GATTCCTACAGGAAGCAAGTAGTAATTGATGGAGAAACCTGTCTCTTGGATATTCTCGAC | 352 |
| | | \|\|\|\|\|\|\|\|\|\|\|\|\|\|\|\|\|\|\|\|\|\|\|\|\|\|\|\|\|\|\|\|\|\|\|\|\|\|\|\|\|\|\|\|\|\|\|\|\|\|\|\|\|\|\|\|\|\|\|\| | |
| Cyno | 293 | GATTCCTACAGGAAGCAAGTAGTAATTGATGGAGAAACCTGTCTCTTGGATATTCTCGAC | 352 |
| Human | 353 | ACAGCAGGTCAAGAGGAGTACAGTGCAATGAGGGACCAGTACATGAGGACTGGGGAGGGC | 412 |
| | | \|\|\|\|\|\|\|\|\|\|\|\|\|\|\|\|\|\|\|\|\|\|\|\|\|\|\|\|\|\|\|\|\|\|\|\|\|\|\|\|\|\|\|\|\|\|\|\|\|\|\|\|\|\|\|\|\|\|\|\| | |
| Cyno | 353 | ACAGCAGGTCAAGAGGAGTACAGTGCAATGAGGGACCAGTACATGAGGACTGGGGAGGGC | 412 |
| Human | 413 | TTTCTTTGTGTATTTGCCATAAATAATACTAAATCATTTGAAGATATTCACCATTATAGA | 472 |
| | | \|\|\|\|\|\|\|\|\|\|\|\|\|\|\|\|\|\|\|\|\|\|\|\|\|\|\|\|\|\|\|\|\|\|\|\|\|\|\|\|\|\|\|\|\|\|\|\|\|\|\|\|\|\|\|\|\|\|\|\| | |
| Cyno | 413 | TTTCTTTGTGTATTTGCCATAAATAATACTAAATCATTTGAAGATATTCACCATTATAGA | 472 |
| Human | 473 | GAACAAATTAAAAGAGTTAAGGACTCTGAAGATGTACCTATGGTCCTAGTAGGAAATAAA | 532 |
| | | \|\|\|\|\|\|\|\|\|\|\|\|\|\|\|\|\|\|\|\|\|\|\|\|\|\|\|\|\|\|\|\|\|\|\|\|\|\|\|\|\|\|\|\|\|\|\|\|\|\|\|\|\|\|\|\|\|\|\|\| | |
| Cyno | 473 | GAACAAATTAAAAGAGTTAAGGACTCTGAAGATGTACCTATGGTCCTAGTAGGAAATAAA | 532 |
| Human | 533 | TGTGATTTGCCTTCTAGAACAGTAGACACAAAACAGGCTCAGGACTTAGCAAGAAGTTAT | 592 |
| | | \|\|\|\|\|\|\|\|\|\|\|\|\|\|\|\|\|\|\|\|\|\|\|\|\|\|\|\|\|\|\|\|\|\|\|\|\|\|\|\|\|\|\|\|\|\|\|\|\|\|\|\|\|\|\|\|\|\|\| | |
| Cyno | 533 | TGTGATTTGCCTTCTAGAACAGTAGACACAAAACAGGCTCAGGACTTAGCAAGAAGTTAC | 592 |
| Human | 593 | GGAATTCCTTTTATTGAAACATCAGCAAAGACAAGACAGGGTGTTGATGATGCCTTCTAT | 652 |
| | | \|\|\|\|\|\|\|\|\|\|\|\|\|\|\|\|\|\|\|\|\|\|\|\|\|\|\|\|\|\|\|\|\|\|\|\|\|\|\|\|\|\|\|\|\|\|\|\|\|\|\|\|\|\|\|\|\|\|\|\| | |
| Cyno | 593 | GGAATTCCTTTTATTGAAACATCAGCAAAGACAAGACAGGGTGTTGATGATGCCTTCTAT | 652 |
| Human | 653 | ACATTAGTTCGagaaattcgaaaacataaagaaaagatgagcaaagatggtaaaaagaaG | 712 |
| | | \|\|\|\|\|\|\|\|\|\|\|\|\|\|\|\|\|\|\|\|\|\|\|\|\|\|\|\|\|\|\|\|\|\|\|\|\|\|\|\|\|\|\|\|\|\|\|\|\|\|\|\|\|\|\|\|\|\|\|\| | |
| Cyno | 653 | ACATTAGTTCGAGAAATTCGAAAACATAAAGAAAAGATGAGCAAAGATGGTAAAAAGAAG | 712 |
| Human | 713 | aaaaagaagtcaaagacaaagTGTGTAATTATGTAAATACAATTTGTACTTTTTTCTTAA | 772 |
| | | \|\|\|\|\|\|\|\|\|\|\|\|\|\|\|\|\|\|\|\|\|\|\|\|\|\|\|\|\|\|\|\|\|\|\|\|\|\|\|\|\|\|\|\|\|\|\|\|\|\|\|\|\|\|\|\|\|\|\|\| | |
| Cyno | 713 | AAAAAGAAGTCAAAGACAAAGTGTGTAATTATGTAAATACAATTTGTACTTTTTTCTTAA | 772 |
| Human | 773 | GGCATACTAGTACAAGTGGTAATTTTTGTACATTACACTAAATTATTAGCATTTGTTTTA | 832 |
| | | \|\|\|\|\|\|\|\|\|\|\|\| \|\|\|\|\|\|\|\|\|\|\|\|\|\|\|\|\|\|\|\|\|\|\|\|\|\|\|\|\|\|\|\|\|\|\|\|\|\|\|\|\|\|\|\|\|\|\| | |
| Cyno | 773 | GGCATACTAGTAAAAGTGGTAATTTTTGTACATTACACTAAATTATTAGCATTTGTTTTA | 832 |
| Human | 833 | GCATTACCTAAtttttttCCTGCTCCATGCAGACTGTTAGCTTTTACCTTAAATGCTTAT | 892 |
| | | \|\|\|\|\|\|\|\|\|\|\|\|\|\|\|\|\|\|\|\|\|\|\|\|\|\|\|\|\|\|\|\|\|\|\|\|\|\|\|\|\|\|\|\|\|\|\|\|\|\|\|\|\|\|\|\|\|\|\|\| | |
| Cyno | 833 | GCATTACCTAATTTTTTTCCTGCTCCATGCAGACTGTTAGCTTTTACCTTAAATGCTTAT | 892 |
| Human | 893 | TTTAAAATGACAGTGGAAGtttttttttCCTCTAAGTGCCAGTATTCCCAGAGTTTTGGT | 952 |
| | | \|\|\|\|\|\|\|\|\|\|\|\|\|\|\|\|\|\|\| \|\|\|\|\|\|\|\|\|\|\|\|\|\|\|\|\|\|\|\|\|\|\|\|\|\|\|\|\|\|\|\|\|\|\|\|\|\| \| | |
| Cyno | 893 | TTTAAAATGACAGTGGAAGCTTTTTTTTCCTCTAAGTGCCAGTATTCCCAGAGTTTTGAT | 952 |
| Human | 953 | TTTTGAACTAGCAATGCCTGTGAAAAAGAAACTGAATACCTAAGATTTCTGTCTTGGGGT | 1012 |
| | | \|\|\|\|\|\|\|\|\|\|\|\|\|\|\|\|\|\|\|\|\|\|\|\|\|\|\|\|\|\|\|\|\|\|\|\|\|\|\|\|\|\|\|\|\|\|\|\|\|\|\|\|\|\|\|\|\|\|\|\| | |
| Cyno | 953 | TTTTGAACTAGCAATGCCTGTGAAAAAGAAACTGAATACCTAAGATTTCTGTCTTGGGGT | 1012 |
| Human | 1013 | TTTTGGTGCATGCAGTTGATTACTTCTTATTTTTCTTACCAATTGTGAATGTTGGTGTGA | 1072 |
| | | \|\|\|\|\|\|\|\|\| | |
| Cyno | 1013 | TTTTGGTGCNNNNNNNNNNNNNNNNNNNNNNNNNNNNNNNNNNNNNNNNNNNNNNNNNNN | 1072 |
| Human | 1073 | AACAAATTAATGAAGCTTTTGAATCATCCCTATTCTGTGTTTTATCTAGTCACATAAATG | 1132 |
| | | \|\|\|\|\|\|\|\|\|\|\|\|\|\| \|\|\|\|\|\|\|\|\|\|\|\|\|\|\|\|\|\|\|\|\|\|\|\|\|\|\|\|\|\|\|\|\|\|\|\|\|\|\|\|\| | |
| Cyno | 1073 | NNNNAATTAATGAAGCTTCTGAATCATCCCTATTCTGTGTTTTATCTAGTCACATAAATG | 1132 |
| Human | 1133 | GATTAATTACTAATTTCAGTTGAGACCTTCTAATTGGTTTTTACTGAAACATTGAGGGAA | 1192 |
| | | \|\|\|\|\|\|\|\|\|\|\|\|\|\|\|\|\|\|\|\|\|\|\|\|\|\|\|\|\|\|\|\|\|\|\|\|\|\|\|\|\|\|\|\|\|\|\|\|\|\|\|\|\|\|\|\|\|\|\|\| | |
| Cyno | 1133 | GATTAATTACTAATTTCAGTTGAGACCTTCTAATTGGTTTTTACTGAAACATTGAGGGAA | 1192 |
| Human | 1193 | CACAAATTTATGGGCTTCCTGATGATGATTCTTCTAGGCATCATGTCCTATAGTTTGTCA | 1252 |
| | | \|\|\|\|\|\| \|\|\|\|\|\|\|\|\|\|\|\|\|\|\|\|\|\|\|\|\|\|\|\|\|\|\|\| | |
| Cyno | 1193 | CACAAANNNNNNNNNNNNNNNNNNNNNNNNNNTCTAGGCATCATGTCCTATAGTTTGTCA | 1252 |
| Human | 1253 | TCCCTGATGAATGTAAAGTTACACTGTTCACAAAGGTTTTGTCTCCTTTCCACTGCTATT | 1312 |
| | | \|\|\|\|\|\|\|\|\|\|\|\|\|\|\|\|\|\|\|\|\|\|\|\|\|\|\|\|\|\|\|\|\|\|\|\|\|\|\|\|\|\| \|\|\|\|\|\|\|\|\|\|\|\|\|\|\|\| | |
| Cyno | 1253 | TCCCTGATGAATGTAAAGTTACACTGTTCACAAAGGTTTTGTTCCCTTTCCACTGCTATT | 1312 |
| Human | 1313 | AGTCATGGTCACTCTCCCCAAAATATTATATTTTTTCTATaaaaagaaaaaaatggaaaA | 1372 |
| | | \|\|\|\|\|\|\|\|\|\|\|\|\|\|\|\|\|\|\| \|\|\|\|\|\|\| | |
| Cyno | 1313 | AGTCATGGTCACTCTCCCCGNNNNNNNNNNNNNNNNNNNNNNNNNNNNNNNNNTGGAAAA | 1372 |
| Human | 1373 | aaaTTACAAGGCAATGGAAACTATTATAAGGCCATTTCCTTTTCACATTAGATAAATTAC | 1432 |
| | | \|\|\|\|\|\|\|\|\|\| \|\|\|\|\|\|\|\|\|\|\|\|\|\|\|\|\|\|\|\|\|\| \|\|\|\|\|\|\|\|\|\|\|\|\|\|\|\|\|\|\|\|\|\|\|\|\|\| | |
| Cyno | 1373 | AAATTACAAGTCAATGGAAACTATTATAAGGCCGTTTCCTTTTCACATTAGATAAATTAC | 1432 |
| Human | 1433 | TATAAAGACTCCTAATAGCTTTTCCTGTTAAGGCAGACCCAGTATGAAATGGGGATTATT | 1492 |
| | | \|\|\|\|\|\|\|\|\|\|\|\|\|\|\|\|\|\|\|\|\|\|\|\|\|\|\|\|\|\|\|\|\|\|\|\|\|\|\|\|\|\|\|\|\|\|\|\|\|\|\|\|\|\|\|\|\| | |
| Cyno | 1433 | TATAAAGACTCCTAATAGCTTTTCCTGTTAAGGCAGACCCAGTATGAAATGGGGATTNNN | 1492 |
| Human | 1493 | ATAGCAACCATTTTGGGGCTATATTTACATGCTACTAAATTTTTATAATAATTGAAAAGA | 1552 |
| | | \|\|\|\|\|\|\|\|\|\|\|\|\|\|\|\|\|\|\|\| \| | |
| Cyno | 1493 | NNNNNNNNNNNNNNNNNNNNNNNNNNNNNNNNNNNNNAATTTTTATAATAATTGAAATAA | 1552 |
| Human | 1553 | TTTTAACAAGTATAAAAAATTCTCATAGGAATTAAATGTAGTCTCCCTGTGTCAGACTGC | 1612 |
| | | \|\|\|\|\|\|\|\| \|\|\|\|\|\|\|\|\|\|\|\|\|\|\|\|\|\|\|\|\|\|\|\|\|\|\|\|\|\|\|\|\|\|\|\|\|\|\|\|\|\|\|\|\|\|\| \|\|\| | |
| Cyno | 1553 | TTTTAACATGTATAAAAAATTCTCATAGGAATTAAATGTAGTCTCCCTGTGTCAGATTGC | 1612 |
| Human | 1613 | TCTTTCATAGTATAACTTTAAATCTTTTCTTCAACTTGAGTCTTTGAAGATAGTTTTAAT | 1672 |
| | | \|\|\|\|\|\|\|\|\|\|\|\|\|\|\|\|\|\|\|\|\|\|\|\|\|\|\|\|\|\|\|\|\|\|\|\|\| \|\|\|\|\|\|\|\|\|\|\| \|\|\|\|\|\|\|\|\|\| | |
| Cyno | 1613 | TCTTTCATAGTATAACTTTAAATCTTTTCTTCAACTTCAGTCTTTGAAGGTAGTTTTAAT | 1672 |
| Human | 1673 | TCTGCTTGTGACATTAAAAGATTATTTGGGCCAGTTATAGCTTATTAGGTGTTGAAGAGA | 1732 |
| | | \|\|\|\|\|\|\|\|\|\|\|\|\|\|\|\|\|\|\|\|\|\|\|\|\|\|\|\|\|\|\|\|\|\|\|\|\|\|\|\|\|\|\|\| \|\|\|\|\|\|\|\|\|\|\|\|\|\|\| | |
| Cyno | 1673 | TCTGCTTGTGACATTAAAAGATTATTTGGGCCAGTTATAGCTTAGTAGGTGTTGAAGAGA | 1732 |
| Human | 1733 | CCAAGGTTGCAAGGCCAGGCCCTGTGTGAACCTTTGAGCTTTCATAGAGAGTTTCACAGC | 1792 |
| | | \|\|\|\|\|\|\|\|\|\|\| \|\|\|\|\|\|\|\|\|\|\|\|\|\|\|\|\|\|\|\|\|\|\|\|\|\|\|\|\|\|\|\|\|\|\|\|\|\|\|\|\|\|\|\|\|\|\|\| | |
| Cyno | 1733 | CCAAGGTTGCATGGCCAGGCCCTGTGTGAACCTTTGAGCTTTCATAGAGAGTTTCACAGC | 1792 |
| Human | 1793 | ATGGACTGTGTCCCCACGGTCATCCAGTGTTGTCATGCATTGGTTAGTCAAAATGGGGAG | 1852 |
| | | \|\|\|\|\|\|\|\|\|\|\|\|\|\|\|\| \|\|\|\|\|\|\|\|\|\|\|\|\|\|\|\|\|\|\|\|\|\|\|\|\|\|\|\|\|\|\|\|\|\|\|\|\|\|\|\|\|\|\| | |
| Cyno | 1793 | ATGGACTGTGTCCCCATGGTCATCCAGTGTTGTCATGCATTGGTTAGTCAAAATGGGGAG | 1852 |
| Human | 1853 | GGACTAGGGCAGTTTGGATAGCTCAACAAGATACAATCTCACTCTGTGGTGGTCCTGCTG | 1912 |
| | | \|\|\|\|\|\|\|\| \|\|\|\|\|\|\|\|\|\|\|\| \|\|\|\|\|\|\|\|\|\|\|\|\| \|\|\|\|\|\|\|\|\|\|\|\|\|\|\|\|\|\|\|\|\|\|\|\| | |
| Cyno | 1853 | GGACTAGGACAGTTTGGATAGGTCAACAAGATACATTCTCACTCTGTGGTGGTCCTGCTG | 1912 |
| Human | 1913 | ACAAATCAAGAGCATTGCTTTTGTTTCTTAAGAAAACAAACTCTTTTTTAAAAATTACTT | 1972 |
| | | \|\|\|\|\|\|\|\|\|\|\|\|\|\|\|\|\|\|\|\|\|\|\|\|\|\| \|\|\|\|\|\|\|\|\| \|\|\|\|\|\|\|\|\|\|\|\|\|\|\|\|\|\|\|\|\|\| | |
| Cyno | 1913 | ACAAATCAAGAGCATTGCTTTTGTTTTTTAAGAAAATGAACTCTTTTTTAAAAATTACTT | 1972 |
| Human | 1973 | TTAAATATTAACTCAAAAGTTGAGATTTTGGGGTGGTGGTGTGCCAAGACATTAAttttT | 2032 |
| | | \|\|\|\|\|\|\|\|\|\|\|\|\|\|\|\|\|\|\|\|\|\|\|\|\|\|\|\|\|\|\|\|\| \|\|\|\|\|\| \|\|\|\|\|\|\|\|\|\|\|\|\|\|\|\|\|\|\| | |
| Cyno | 1973 | TTAAATATTAACTCAAAAGTTGAGATTTTGGGGGGGTGGTATGCCAAGACATTAATTTTT | 2032 |
| Human | 2033 | tttttAAACAATGAAGTGAAAAAGTTTTACAATCTCTAGGTTTGGCTAGTTCTCTTAACA | 2092 |
| | | \|\| \|\|\|\|\|\|\|\|\|\|\|\|\|\|\|\|\|\|\|\|\|\|\|\|\|\|\|\|\|\|\|\|\|\|\|\|\|\|\| | |
| Cyno | 2033 | TTNNNNNNNNNNNNNNNNNNNAAGTTTTACAATCTCTAGGTTTGGCTAGTTCTCTTAACA | 2092 |

| | | | | |
|---|---|---|---|---|
| Human | 2093 | CTGGTTAAATTAACATTGCATAAACACTTTTCAAG | 2127 | [SEQ ID NO: 1710] |
| | | \|\|\|\|\|\|\|\|\|\|\|\|\|\|\|\|\| \|\|\|\|\|\|\|\|\|\|\|\|\|\|\|\|\| | | |
| Cyno | 2093 | CTGGTTAAATTAACATTTCATAAACACTTTTCAAG | 2127 | [SEQ ID NO: 1711] |

| | | | |
|---|---|---|---|
| Human | 2184 | atttaaaatgttacttattttaaaataaatGAAGTGAGATGGCATGGTGAGGTGAAAGTA | 2243 |
| | | \|\|\|\|\|\|\|\|\|\|\|\|\|\|\|\|\|\|\|\|\|\|\|\|\|\|\| \|\|\|\|\| \|\|\|\|\|\|\|\|\|\|\|\|\|\|\|\|\|\|\|\|\|\|\|\|\|\| | |
| Cyno | 2184 | ATTTAAAATGTTACTTATTTTAAAATATATGAAATGAGATGGCATGGTGAGGTGAAAGTA | 2243 |
| Human | 2244 | TCACTGGACTAGGAAGAAGGTGACTTAGGTTCTAGATAGGTGTCTTTTAGGACTCTGATT | 2303 |
| | | \|\|\|\|\|\|\|\|\|\|\| \|\|\|\|\|\|\|\|\|\|\|\|\|\|\|\|\|\|\|\|\|\|\|\|\|\| \|\|\|\|\|\|\|\|\|\|\|\|\|\|\|\|\|\|\|\| | |
| Cyno | 2244 | TCACTGGACTANNAAGAAGGTGACTTAGGTTCTAGATAGTTGTCTTTTAGGACTCTGATT | 2303 |
| Human | 2304 | TTGAGGACATCACTTACTATCCATTTCTTCATGTTAAAAGAAGTCATCTCAAACTCTTAG | 2363 |
| | | \|\|\|\|\|\|\|\|\|\|\|\|\|\|\|\|\|\|\|\|\|\|\|\|\|\|\|\|\|\|\|\|\|\|\|\|\| | |
| Cyno | 2304 | TTGAGGACATCACTTACTATCCATTTCTTCATGTTAANNNNNNNNNNNNNNNNNNNNNNN | 2363 |
| Human | 2364 | ttttttttttttACAACTATGTAATTTATATTCCATTTACATAAGGATACACTTATTTGT | 2423 |
| | | \|\|\|\|\|\|\|\|\|\|\|\|\|\|\| \|\|\|\|\|\|\|\|\|\|\| \|\|\|\|\|\|\| \|\|\|\|\|\|\|\|\|\|\|\|\|\|\|\|\| | |
| Cyno | 2364 | NNNNNNNTTTTTACAACTATGTGATTTATATTCCGTTTACATGAGGATACACTTATTTGT | 2423 |
| Human | 2424 | CAAGCTCAGCACAATCTGTAAATTTTTAACCTATGTTACACCATCTTCAGTGCCAGTCTT | 2483 |
| | | \|\|\|\|\|\|\|\|\|\|\|\|\|\|\|\|\| \|\|\|\|\|\|\|\|\|\|\|\|\|\|\|\|\|\|\|\|\|\|\|\|\|\|\|\|\|\|\|\|\|\|\|\| \|\|\|\| | |
| Cyno | 2424 | CAAGCTCAGCACAATCTAAAAATTTTTAACCTATGTTACACCATCTTCAGTGCCAATCTT | 2483 |
| Human | 2484 | GGGCAAAATTGTGCAAGAGGTGAAGTTTATATTTGAATATCCATTCTCGTTTTAGGACTC | 2543 |
| | | \|\|\|\|\|\|\|\|\|\|\|\|\|\|\|\|\|\|\|\|\|\|\|\|\|\|\|\|\|\|\|\|\|\|\|\|\|\|\|\|\|\|\|\|\|\|\|\|\|\|\|\|\|\|\|\|\|\|\|\| | |
| Cyno | 2484 | GGGCAAAATTGTGCAAGAGGTGAAGTTTATATTTGAATATCCATTCTCGTTTTAGGACTC | 2543 |
| Human | 2544 | TTCTTCCATATTAGTGTCATCTTGCCTCCCTACCTTCCACATGCCCCATGACTTGATGCA | 2603 |
| | | \| \|\|\|\|\|\|\| \|\|\|\|\|\|\|\|\|\|\|\|\|\|\|\|\| \|\|\|\|\|\|\|\|\|\|\|\|\|\|\|\|\|\|\|\|\|\|\|\|\|\|\|\|\|\|\|\| | |
| Cyno | 2544 | TCCTTCCATGTTAGTGTCATCTTGCCTGCCTACCTTCCACATGCCCCATGACTTGATGCA | 2603 |
| Human | 2604 | GTTTTAATACTTGTAATTCCCCTAACCATAAGATTTACTGCTGCTGTGGATATCTCCATG | 2663 |
| | | \|\|\|\|\|\|\|\|\|\|\|\| \|\|\|\|\|\|\|\|\|\|\|\|\|\|\|\|\|\|\|\|\|\|\|\|\|\|\|\|\|\|\|\| \|\|\|\|\|\|\|\|\|\|\|\|\|\| | |
| Cyno | 2604 | GTTTTAATACTTCTAATTCCCCTAACCATAAGATTTACTGCTGCTATGGATATCTCCATG | 2663 |
| Human | 2664 | AAGTTTTCCCACTGAGTCACATCAGAAATGCCCTACATCTTATTTCCTCAGGGCTCAAGA | 2723 |
| | | \|\|\|\|\|\|\|\|\|\| \|\| | |
| Cyno | 2664 | AAGTTTTCCCNNNNNNNNNNNNNNNNNNNNNNNNNNNNNNNNNNNNNNNNNNNNNNNNGA | 2723 |
| Human | 2724 | GAATCTGACAGATACCATAAAGGGATTTGACCTAATCACTAATTTTCAGGTGGTGGCTGA | 2783 |
| | | \|\|\|\|\|\|\|\|\|\|\|\|\|\|\|\|\|\|\|\| \|\|\|\|\|\|\|\|\|\|\|\|\|\|\|\|\|\|\|\|\|\|\|\|\|\|\|\|\|\|\|\|\|\|\|\| \|\| | |
| Cyno | 2724 | GAATCTGACAGATACCATAATGGGATTTGACCTAATCACTAATTTTCAGGTGGTGGCCGA | 2783 |
| Human | 2784 | TGCTTTGAACATCTCTTTGCTGCCCAATCCATTAGCGACAGTAGGATTTTTCAAACCTGG | 2843 |
| | | \| \|\|\|\|\|\|\| \|\| \|\|\| \|\|\|\|\|\|\|\|\|\|\|\|\|\|\|\|\|\|\|\|\|\|\|\|\|\|\|\|\|\|\|\|\|\|\|\| \|\|\|\|\|\| | |
| Cyno | 2784 | TCCTTTGAAAATATCTCTGCTGCCCAATCCATTAGCGACAGTAGGATTTTTCAGACCTGG | 2843 |
| Human | 2844 | TATGAATAGACAGAACCCTATCCAGTGGAAGGAGAATTTAATAAAGATAGTGCTGAAAGA | 2903 |
| | | \|\|\|\|\|\|\|\|\|\|\|\|\|\|\|\|\|\|\|\|\|\|\|\|\|\|\|\|\|\|\|\|\|\|\|\|\|\|\|\|\|\|\|\|\|\|\|\|\|\|\| \|\|\|\|\|\| \| | |
| Cyno | 2844 | TATGAATAGACAGAACCCTATCCAGTGGAAGGAGAATTTAATAAAGATAGTACTGAAATA | 2903 |
| Human | 2904 | ATTCCTTAGGTAATCTATAACTAGGACTACTCCTGGTAACAGTAATACATTCCATTGTTT | 2963 |
| | | \|\|\|\|\|\| \|\|\|\|\|\|\|\|\|\| \|\|\|\|\|\|\|\|\|\|\|\|\|\|\|\|\|\|\|\|\|\|\|\|\|\|\|\|\|\|\|\|\|\|\|\|\|\|\|\|\|\| | |
| Cyno | 2904 | ATTCCTAAGGTAATCTACAACTAGGACTACTCCTGGTAACAGTAATACATTCCATTGTTT | 2963 |

| | | | | |
|---|---|---|---|---|
| Human | 2964 | TAGTAACCAGAAAT | 2977 | [SEQ ID NO: 1712] |
| | | \|\|\|\|\|\|\|\|\|\|\|\|\|\| | | |
| Cyno | 2964 | TAGTAACCAGAAAT | 2977 | [SEQ ID NO: 1713] |

| | | | |
|---|---|---|---|
| Human | 3053 | CCAGGCTGGAATGCAGTGGCGCCATCTCAGCTCACTGCAACCTCCATCTCCCAGGTTCAA | 3112 |
| | | \|\|\|\|\|\|\|\|\|\|\|\|\|\|\|\|\|\|\|\|\|\|\|\|\|\|\|\|\|\|\|\|\|\|\|\|\|\|\|\|\|\|\|\|\|\|\|\|\|\|\|\|\|\|\|\|\|\|\|\| | |
| Cyno | 3053 | CCAGGCTGGAATGCAGTGGCGCCATCTCAGCTCACTGCAACCTCCATCTCCCAGGTTCAA | 3112 |
| Human | 3113 | GCGATTCTCGTGCCTCGGCCTCCTGAGTAGCTGGGATTACAGGCGTGTGCCACTACACTC | 3172 |
| | | \|\|\|\|\|\|\|\|\|\|\|\|\|\|\|\|\|\|\| \|\|\|\|\|\|\|\|\|\|\|\|\|\|\|\|\|\|\|\|\|\|\|\| \|\|\|\|\|\| \| \|\|\|\|\|\| | |
| Cyno | 3113 | GCGATTCTCGTGCCTCGGCATCCTGAGTAGCTGGGATTACAGGCATGTGCCNCCACACTC | 3172 |
| Human | 3173 | AACTAATTTTTGTATTTTTAGGAGAGACGGGGTTTCACCCTGTTGGCCAGGCTGGTCTCG | 3232 |
| | | \|\|\|\|\|\|\|\|\|\|\|\|\|\| \|\|\|\|\|\|\|\|\|\|\|\|\| \|\|\|\|\|\|\|\|\|\|\|\| \|\|\|\|\|\|\|\|\|\|\|\|\|\|\|\|\|\| | |
| Cyno | 3173 | AACTAATTTTTGTAGTTTTAGGAGAGACAGGGTTTCACCCTATTGGCCAGGCTGGTCTCG | 3232 |
| Human | 3233 | AACTCCTGACCTCAAGTGATTCACCCACCTTGGCCTCATAAACCTGTTTTGCAGAACTCA | 3292 |
| | | \|\|\|\|\|\|\|\|\|\|\|\|\|\|\|\|\|\|\|\|\|\|\|\|\|\|\|\|\|\| \|\|\|\|\|\|\|\|\| \| \|\|\|\|\|\|\|\|\|\|\|\|\|\|\| | |
| Cyno | 3233 | AACTCCTGACCTCAAGTGATTCACCCACCTNNNCCTCATAAAGCCGTTTTGCAGAACTCA | 3292 |
| Human | 3293 | TTTATTCAGCAAATATTTATTGAGTGCCTACCAGATGCCAGTCACCGCACAAGGCACTGG | 3352 |
| | | \|\|\|\|\|\|\|\|\|\|\|\|\|\|\|\|\|\|\|\|\|\|\|\|\|\|\|\|\|\|\|\|\|\|\|\|\|\|\|\|\|\|\|\| \|\|\|\|\|\|\|\|\|\|\|\|\| | |
| Cyno | 3293 | TTTATTCAGCAAATATTTATTGAGTGCCTACCAGATGCCAGTCATTTCACAAGGCACTGG | 3352 |
| Human | 3353 | GTATATGGTATCCCCAAACAAGAGACATAATCCCGGTCCTTAGGTAGTGCTAG | 3405 |
| | | \|\|\|\|\|\|\|\|\|\|\|\|\|\|\|\|\|\|\|\|\|\|\|\|\|\|\|\|\|\|\|\|\| \|\|\|\|\|\|\|\|\| \|\|\|\|\|\|\|\|\| | |
| Cyno | 3353 | GTATATGGTATCCCCAAACAAGAGACATAATCCTGGTCCTTAGCTAGTGCTAG | 3405 |
| Human | 3643 | TTACTGTACACATTAAGGTGTATGTCAGATATTCATATTGACCCAAATGTGTAATATTCC | 3702 |
| | | \|\|\|\|\|\|\|\|\|\|\|\|\|\|\|\|\|\|\|\|\|\|\|\|\|\|\|\|\|\|\|\| \|\|\|\|\|\|\|\| | |
| Cyno | 3643 | TTACTGTACACATTAAGGTGTATGTCAGATATCCATATTGAANNNNNNNNNNNNNNNNNN | 3702 |
| Human | 3703 | AGTTTTCTCTGCATAAGTAATTAAAATATACTTAAAAATTAATAGTTTTATCTGGGTACA | 3762 |
| | | \|\|\|\|\|\|\|\|\|\|\|\|\|\|\|\|\|\|\|\|\|\|\|\|\|\|\|\|\|\|\|\|\|\|\|\|\|\|\|\|\|\|\| | |
| Cyno | 3703 | NNNNNNNNNNNNNNNNATAATTAAAATATACTTAAAAATTAATAGTTTTATCTGGGTACA | 3762 |
| Human | 3763 | AATAAACAGGTGCCTGAACTAGTTCACAGACAAGGAAACTTCTATGTAAAAATCACTATG | 3822 |
| | | \|\| \|\|\|\|\|\|\|\|\|\|\|\|\|\|\|\|\|\|\|\|\|\|\|\|\|\|\|\|\|\|\|\|\|\|\|\|\|\|\|\|\|\|\|\|\|\|\|\|\|\|\|\| \|\|\|\| | |
| Cyno | 3763 | AACAAACAGGTGCCTGAACTAGTTCACAGACAAGGAAACTTCTATGTAAAAATCAGTATG | 3822 |
| Human | 3823 | ATTTCTGAATTGCTATGTGAAACTACAGATCTTTGGAACACTGTTTAGGTAGGGTGTTAA | 3882 |
| | | \|\|\|\| \|\|\|\|\|\|\|\|\|\|\|\|\|\|\|\|\|\|\|\|\|\|\|\| \|\|\|\|\|\|\| \|\|\|\|\|\|\|\|\|\|\| | |
| Cyno | 3823 | ATTTNNNNNNNNNNNNGTGAAACTACAGATCTTTGGAACATTGTTTAGATAGGGTGTTAA | 3882 |
| Human | 3883 | GACTTACACAGTACCTCGTTTCTACACAGAGAAAGAAATGGCCATACTTCAGGAACTGCA | 3942 |
| | | \|\|\|\|\|\|\|\|\|\|\|\|\|\|\| \|\|\|\|\|\|\|\|\|\|\|\| \|\|\|\|\|\|\|\|\|\|\|\|\|\|\|\|\|\|\|\|\|\|\|\|\|\|\|\|\|\|\| | |
| Cyno | 3883 | GACTTACACAGTACCACGTTTCTACACACAGAAAGAAATGGCCATACTTCAGGAACTGCA | 3942 |
| Human | 3943 | GTGCTTATGAGGGGATATTTAGGCCTCTTGAATTTTTGATGTAGATGGGCAtttttttAA | 4002 |
| | | \|\|\|\|\| \|\|\|\|\|\|\|\|\|\|\|\|\|\|\|\|\|\|\|\|\|\|\|\|\|\|\|\|\|\|\|\|\|\|\|\|\|\|\|\|\|\|\|\|\|\|\|\|\|\|\|\|\|\| | |
| Cyno | 3943 | GTGCTAATGAGGGGATATTTAGGCCTCTTGAATTTTTGATGTAGATGGGCATTTTTTTAA | 4002 |
| Human | 4003 | GGTAGTGGTTAATTACCTTTATGTGAACTTTGAATGGTTTAACAAAAGATTTGTTTTTGT | 4062 |
| | | \|\|\|\| \| \|\|\|\|\|\|\|\|\|\|\|\|\|\|\|\|\|\|\|\|\|\|\|\|\|\|\|\|\|\|\|\|\|\|\|\|\|\|\|\|\|\|\|\|\|\|\|\|\|\|\| | |
| Cyno | 4003 | GGTANNTGGTAATTACCTTTATGTGAACTTTGAATGGTTTAACAAAAGATTTGTTTTTGT | 4062 |
| Human | 4063 | AGAGATTTTAAAGGGGGAGAATTCTAGAAATAAATGTTACCTAATTATTACAGCCTTAAA | 4122 |
| | | \|\|\|\|\|\|\|\|\|\|\|\|\|\|\|\|\|\|\|\|\|\| \|\|\|\|\|\|\|\|\|\|\|\|\|\|\|\| \|\|\|\| \|\|\|\|\|\|\|\| | |
| Cyno | 4063 | AGAGATTTTAAAGGGGGAGAATGCTAGAAATAAATGTTATCTAANNNNNNNCGCCTTAAA | 4122 |
| Human | 4123 | GACAAAAATCCTTGTTGAAGtttttttaaaaaaaGCTAAATTACATAGACTTAGGCATTA | 4182 |
| | | \|\| \|\|\|\|\|\|\|\|\|\|\|\|\|\|\|\|\|\|\|\|\|\|\| \|\|\|\|\|\|\|\|\|\|\|\|\|\|\|\|\|\|\|\|\| \|\|\|\|\|\|\|\|\|\|\| | |
| Cyno | 4123 | GATAAAAATCCTTGTTGAAGTTTTTTAAAAAAAAGCTAAATTACATAGTCTTAGGCATTA | 4182 |
| Human | 4183 | ACATGTTTGTGGAAGAATATAGCAGACGTATATTGTATCATTTGAGTGAATGTTCCCAAG | 4242 |
| | | \|\|\|\|\|\|\|\|\|\|\|\|\|\|\|\|\|\|\|\|\|\|\|\| \|\| \|\|\|\|\|\|\|\|\|\|\|\|\|\|\|\|\|\|\|\|\|\|\| \|\|\|\|\|\|\| | |
| Cyno | 4183 | ACATGTTTGTGGAAGAATATAGCACACATATATTGTATCATTTGAGTGAATATTCCCAAA | 4242 |
| Human | 4243 | TAGGCATTCTAGGCTCTATTTAACTGAGTCACACTGCATAGGAATTTAGAACCTAACTTT | 4302 |
| | | \|\|\|\|\|\|\|\|\|\|\|\|\|\|\|\|\|\|\|\|\|\|\|\|\|\|\|\|\|\|\|\|\|\|\|\|\|\|\|\|\|\|\|\|\|\|\|\|\|\|\|\|\|\|\|\|\|\|\|\| | |
| Cyno | 4243 | TAGGCATTCTAGGCTCTATTTAACTGAGTCACACTGCATAGGAATTTAGAACCTAACTTT | 4302 |
| Human | 4303 | TATAGGTTATCAAAACTGTTGTCACCATTGCACAATTTTGTCCTAATATATACATAGAAA | 4362 |
| | | \|\|\|\|\|\|\|\|\|\|\|\|\|\|\|\|\|\|\|\|\| \| \|\|\|\|\|\|\|\|\|\|\|\|\|\|\|\|\|\|\|\|\|\|\|\| \|\|\|\|\|\| \|\| \| | |
| Cyno | 4303 | TATAGGTTATCAAAACTGTTGCCTCCATTGCACAATTTTGTCCTAATACATACATGGAGA | 4362 |
| Human | 4363 | CTTTGTGGGGCATGTTAAGTTACAGTTTGCACAAGTTCATCTCATTTGTATTCCATTGAT | 4422 |
| | | \|\|\|\|\|\|\|\|\|\|\|\|\|\|\|\|\|\|\|\|\|\|\|\|\|\|\|\|\|\|\|\|\|\|\|\|\|\|\|\|\|\|\|\|\|\|\|\|\|\|\|\|\|\|\|\|\|\|\|\| | |
| Cyno | 4363 | CTTTGTGGGGCATGTTAAGTTACAGTTTGCACAAGTTCATCTCATTTGTATTCCATTGAT | 4422 |
| Human | 4423 | tttttttttcttctaaacattttttcttcaaacagtatataactttttttaggggatttT | 4482 |
| | | \|\|\|\|\|\|\|\|\|\|\|\|\|\|\|\|\|\|\|\|\|\|\|\|\|\|\|\|\|\|\|\|\|\|\|\|\|\|\|\|\|\|\|\|\|\|\|\|\|\|\|\|\|\|\|\|\|\|\|\| | |
| Cyno | 4423 | TTTTTTTTTCTTCTAAACATTTTTTCTTCAAACAGTATATAACTTTTTTTAGGGGATTTT | 4482 |
| Human | 4483 | tttttAGACAGCAAAAACTATCTGAAGATTTCCATTTGTCAAAAAGTAATGATTTCTTGA | 4542 |
| | | \|\|\|\| \|\|\|\|\| \|\|\|\|\|\|\|\|\|\|\|\|\|\|\|\|\|\|\|\|\|\|\|\|\|\|\|\|\|\|\|\|\|\| | |
| Cyno | 4483 | TTTTNNNNNNNNNNNNNNNNTCTGACGATTTCCATTTGTCAAAAAGTAATGATTTCTTGA | 4542 |
| Human | 4543 | TAATTGTGTAGTAATGTTTTTTAGAACCCAGCAGTTACCTTAAAGCTGAATTTATATTTA | 4602 |
| | | \|\|\|\|\| \|\|\|\|\|\|\|\|\|\|\|\|\|\|\| \|\|\|\|\|\|\|\|\|\|\|\|\|\|\|\|\|\|\|\|\|\|\|\|\|\|\|\|\|\|\|\|\|\|\|\|\|\| | |
| Cyno | 4543 | TAATTATGTAGTAATGTTTTTAAGAACCCAGCAGTTACCTTAAAGCTGAATTTATATTTA | 4602 |
| Human | 4603 | GTAACTTCTGTGTTAATACTGGATAGCATGAATTCTGCATTGAGAAACTGAATAGCTGTC | 4662 |
| | | \|\|\|\|\|\|\|\|\|\|\|\|\|\|\|\|\|\|\|\|\|\|\|\|\|\|\|\|\|\|\|\|\|\|\|\|\|\|\|\|\|\|\|\|\|\|\|\|\|\|\|\|\|\| | |
| Cyno | 4603 | ATAACTTCTGTGTTAATACTGGATAGCATGAATTCTGCATTGAGAAACTGAATAGNNNNN | 4662 |
| Human | 4663 | ATAAAATGAAACTTTCTTTCTAAAGAAAGATACTCACATGAGTTCTTGAAGAATAGTCAT | 4722 |
| | | \|\|\|\|\|\|\|\|\|\|\|\|\|\|\|\|\|\|\|\|\|\|\|\| | |
| Cyno | 4663 | NNNNNNNNNNNNNNNNNNNNNNNNNNNNNNNNNNNNCATGAGTTCTTGAAGAATAGTCAT | 4722 |
| Human | 4723 | AACTAGATTAAGATCTGTGTTTTAGTTTAATAGTTTGAAGTGCCTGTTTGGGATAATGAT | 4782 |
| | | \|\|\|\|\|\|\|\|\|\|\|\|\|\|\|\|\|\|\|\|\|\|\|\|\|\|\|\|\|\|\|\|\|\|\|\|\|\|\|\|\|\|\|\|\|\|\|\|\|\|\|\|\|\|\|\|\|\|\|\| | |
| Cyno | 4723 | AACTAGATTAAGATCTGTGTTTTAGTTTAATAGTTTGAAGTGCCTGTTTGGGATAATGAT | 4782 |
| Human | 4783 | AGGTAATTTAGATGAATTTAGGGGaaaaaaaaGTTATCTGCAGATATGTTGAGGGCCCAT | 4842 |
| | | \|\|\|\|\|\|\|\|\|\|\|\|\|\|\|\|\|\|\|\|\|\|\|\| \|\|\|\|\|\|\|\|\|\|\|\|\|\|\|\|\|\|\| \|\|\|\|\|\|\|\|\|\|\|\|\|\|\| | |
| Cyno | 4783 | AGGTAATTTAGATGAATTTAGGGGGAAAAAAAGTTATCTGCAGAAATGTTGAGGGCCCAT | 4842 |
| Human | 4843 | CTCTCCCCCCACACCCCCACAGAGCTAACTGGGTTACAGTGTTTTATCCGAAAGTTTCCA | 4902 |
| | | \|\|\|\|\|\|\|\| \|\|\|\|\|\|\| \|\| \|\|\|\|\|\|\|\|\|\|\|\|\|\|\|\|\|\|\|\|\|\|\|\|\|\|\|\|\|\|\|\|\|\|\|\|\|\|\|\| | |
| Cyno | 4843 | CTCTCCCCACACACCCACATAGAGCTAACTGGGTTACAGTGTTTTATCCGAAAGTTTCCA | 4902 |
| Human | 4903 | ATTCCACTGTCTTGTGTTTTCATGTTGAAAATACTTTTGCATTTTTCCTTTGAGTGCCAA | 4962 |
| | | \|\|\|\|\|\|\|\|\|\|\|\|\|\|\|\|\|\|\|\|\|\|\|\|\|\|\|\|\|\|\|\|\|\|\|\|\|\|\|\|\|\|\|\|\|\|\|\|\|\|\|\|\|\|\|\|\|\|\|\| | |
| Cyno | 4903 | ATTCCACTGTCTTGTGTTTTCATGTTGAAAATACTTTTGCATTTTTCCTTTGAGTGCCAA | 4962 |
| Human | 4963 | TTTCTTACTAGTACTATTTCTTAATGTAACATGTTTACCTGGAATGTATTTTAACTATTT | 5022 |
| | | \|\|\|\|\|\|\|\|\|\|\|\|\|\|\|\|\|\|\|\|\|\|\|\|\|\|\|\|\|\|\|\|\|\|\|\|\|\|\|\|\|\|\|\|\|\|\|\|\|\|\|\|\|\|\|\|\|\|\|\| | |
| Cyno | 4963 | TTTCTTACTAGTACTATTTCTTAATGTAACATGTTTACCTGGAATGTATTTTAACTATTT | 5022 |
| Human | 5023 | TTGTATAGTGTAAACTGAAACATGCACATTTTGTACATTGTGCTTTCTTTTGTGGGACAT | 5082 |
| | | \|\|\|\|\|\|\|\|\|\|\|\|\|\|\|\|\|\|\|\|\|\|\|\|\|\|\|\|\|\|\|\|\|\|\|\|\|\|\|\|\|\|\|\|\|\|\|\|\|\|\|\|\|\|\|\|\|\|\|\| | |
| Cyno | 5023 | TTGTATAGTGTAAACTGAAACATGCACATTTTGTACATTGTGCTTTCTTTTGTGGGACAT | 5082 |
| Human | 5083 | ATGCAGTGTGATCCAGTTGTTTTCCATCATTTGGTTGCGCTGACCTAGGAATGTTGGTCA | 5142 |
| | | \|\|\|\|\|\|\|\|\|\|\|\|\|\|\|\|\|\|\|\|\|\|\|\|\|\|\|\|\|\|\|\|\|\|\|\|\|\|\|\|\|\|\|\|\|\|\|\|\|\|\|\|\|\|\|\|\|\|\|\| | |
| Cyno | 5083 | ATGCAGTGTGATCCAGTTGTTTTCCATCATTTGGTTGCGCTGACCTAGGAATGTTGGTCA | 5142 |
| Human | 5143 | TATCAAACATTAAAAATGACCACTCTTTTAATTGAAATTAACTTTTAAATGTTTATAGGA | 5202 |
| | | \|\|\|\|\|\|\|\|\|\|\|\|\|\|\|\|\|\|\|\|\|\|\|\|\|\|\|\|\|\|\|\|\|\|\|\|\|\|\|\|\|\|\|\|\|\|\|\|\|\|\|\|\|\|\|\|\|\|\|\| | |
| Cyno | 5143 | TATCAAACATTAAAAATGACCACTCTTTTAATTGAAATTAACTTTTAAATGTTTATAGGA | 5202 |
| Human | 5203 | GTATGTGCTGTGAAGTGATCTAAAATTTGTAATATTTTTGTCATGAACTGTACTACTCCT | 5262 |
| | | \|\|\|\|\|\|\|\|\|\|\|\|\|\|\|\|\|\|\|\|\|\|\|\|\|\|\|\|\|\|\|\|\|\|\|\|\|\|\|\|\|\|\|\|\|\|\|\|\|\|\|\|\|\|\|\|\|\|\|\| | |
| Cyno | 5203 | GTATGTGCTGTGAAGTGATCTAAAATTTGTAATATTTTTGTCATGAACTGTACTACTCCT | 5262 |
| Human | 5263 | AATTATTGTAATGTAATAAAAATAGTTACAGTGACaaaaaaaaaaA | 5308 |
| | | \|\|\|\|\|\|\|\|\|\|\|\|\|\|\|\|\|\|\|\|\|\|\|\|\|\|\|\|\|\|\|\|\|\|\|\|\|\|\|\|\|\|\|\|\|\| | |
| Cyno | 5263 | AATTATTGTAATGTAATAAAAATAGTTACAGTGACAAAAAAAAAAA | 5308 |

| | |
|---|---|
| Human | [SEQ ID NO: 1714] |
| Cyno | [SEQ ID NO: 1715] |

[0171] The lowercase letters in the KRAS sequence are an NCBI convention for low-complexity sequences. The matching algorithm frequently excludes these when calculating match scores, as they tend to match against large numbers of things in the genome.

[0172] In one embodiment, the KRAS RNAi agent of the present disclosure comprises a sequence which is identical in the all three of human, rat and cyno KRAS mRNAs. This sequence identity across species facilitates animal testing prior to human testing, since the sequence of the RNAi does not need to be modified due to species-specific differences in the target sequence. In one embodiment, the KRAS RNAi agent comprises a sequence which is identical in the human, mouse and cyno KRAS mRNAs. In various embodiments, the KRAS RNAi agent comprises a sequence which is identical in human and mouse, human and rat, and/or human and cyno.

[0173] Additional Embodiments of a RNAi Agent to KRAS

[0174] The present disclosure pertains to RNAi agents which target human KRAS. In one embodiment, the KRAS RNAi agent comprises a sequence which does not match that of any other mRNA or gene. In one embodiment, the KRAS RNAi agent comprises a sequence which differs from all other known non-KRAS mRNAs or genes by at least 0, 1, 2 or 3 nucleotides. An increase in the number of mismatches between the KRAS RNAi sequence and that of any other gene can decrease the amount of “off-target effects” or the RNAi agent targeting a non-target gene (e.g., a gene that is not KRAS).

[0175] In one embodiment, the KRAS RNAi agent of the present disclosure is administered to a patient in need thereof (e.g., a patient suffering from a KRAS-related disease).

[0176] The patient can also be administered more than one RNAi agent specific to KRAS. In one embodiment, the KRAS RNAi agent(s) of the present disclosure can optionally be administered along with one or more additional pharmaceutical agent appropriate for that disease. In one embodiment, the KRAS RNAi agent(s) of the present disclosure can be optionally administered along with any other appropriate additional treatment, wherein the additional treatment can be a composition (e.g., another agent that can treat a KRAS-related disease such as a cancer treatment) or a method (e.g., surgery to remove a tumor if the KRAS-related disease is a cancer).

[0177] The RNAi agent(s) and additional disease treatment(s) can be administered in any order, simultaneously, concurrently, separately, or sequentially, or in one or multiple doses over time.

[0178] Additional Definitions

[0179] For convenience, the meaning of certain terms and phrases used in the specification, examples, and appended claims, are provided below. If there is an apparent discrepancy between the usage of a term in other parts of this specification and its definition provided in this section, the definition in this section shall prevail.

[0180] As used throughout this disclosure, articles such as “a” and “an” refer to one or more than one (at least one) of the grammatical object of the article.

[0181] RNAi Agent

[0182] In one embodiment, the present disclosure pertains to a KRAS RNAi agent or other composition comprising at least an antisense nucleic acid sequence complementary to a KRAS nucleic acid (or portion thereof), or pertains to a recombinant expression vector encoding an shRNA or composition comprising the antisense nucleic acid that can function as an RNAi as defined below. As used herein, an “antisense” nucleic acid comprises a nucleotide sequence complementary to a “sense” nucleic acid encoding the KRAS protein (e.g., complementary to the coding strand of a double-stranded DNA, complementary to an mRNA or complementary to the coding strand of a KRAS gene or nucleic acid).

[0183] RNAi agents include, as non-limiting examples, siRNAs (small interfering RNAs), dsRNAs (double stranded RNAs), shRNAs (short hairpin RNAs) and miRNAs (micro RNAs).

[0184] In various embodiments, the present disclosure pertains to any RNAi agent comprising a RNA sequence corresponding to any DNA sequences disclosed herein (e.g., wherein the DNA nucleotides are replaced by the corresponding RNA nucleotide, for example, with T in DNA replaced by U in RNA, and with ribose instead of deoxyribose in the sugar-phosphate backbone).

[0185] In one embodiment, the RNAi comprises a single strand. This single-stranded RNAi agent oligonucleotide or polynucleotide can comprise the sense or antisense strand, as described by Sioud 2005 J. Mol. Biol. 348:1079-1090, and references therein. Thus the disclosure encompasses RNAi agents with a single strand comprising either the sense or antisense strand of an RNAi agent described herein. The disclosure also encompasses RNAi agents comprising a single strand, wherein the single strand comprises the sequences of both the antisense and sense strands of any RNAi agent disclosed herein, e.g., wherein the strands are contiguous, connected by a loop or otherwise linked. Examples of such molecules include those with a hairpin between the sense and anti-sense sequences (e.g., shRNA).

[0186] The RNAi agent(s) of the present disclosure target (e.g., bind to, anneal to, hybridize, etc.) the KRAS mRNA. The use of the RNAi agent specific to KRAS results in a decrease of KRAS activity, level and/or expression, e.g., a “knock-down” (KD) or “knock-out” of the target gene or target sequence. In one embodiment, in the case of a disease state characterized by over-expression or hyper-activity of KRAS, administration of a RNAi agent to KRAS knocks down the KRAS target enough to provide a more normal or therapeutic level of KRAS activity or expression.

[0187] In one embodiment, the RNAi comprises a single strand (such as an shRNA, as described herein).

[0188] In various embodiments, one or both strands contain one or more nicks, i.e., a break or missing bond in the phosphate backbone, such that at least one nucleotide subunit is not covalently linked to the adjacent nucleotide subunit in any given sequence. In some embodiments, the passenger strand is nicked (see, for example, WO 2007/107162). In various embodiments, one or both strands contain one or more gaps, e.g., wherein at least one entire nucleotide subunit is absent from the disclosed sequence. Where a sense or antisense sequence contains a gap, that strand is envisioned to comprise two separate oligonucleotides.

[0189] Particularly useful siRNAs include those which can bind specifically to those regions of the KRAS mRNA that have one or more of the following qualities: binding in the coding segment of KRAS; binding at or near the junction of the 5′ untranslated region and the start of the coding segment; binding at or near the translational start site of the mRNA; binding at, across or near junctions of exons and introns; little or no binding to the mRNAs or transcripts of other genes (little or no “off-target effects”); binding to the KRAS mRNA in or near a region or regions that is not double-stranded or a stem region, e.g., those in a loop or single-stranded portion; eliciting little or no immunogenicity; binding in a segment of the KRAS mRNA sequence which is conserved among various animal species (including human, mouse, rat, cyno, etc.), as the presence of a conserved sequence facilitates testing using various laboratory animals; binding to double-stranded region(s) of the mRNA; binding to an AT-rich region (e.g., at least about 50, 51, 52, 53, 54, 55, 56, 57, 58, 59, or 60% AT-rich); and/or lacking particular sequences known or suspected to decrease siRNA activity, e.g., the presence of a GG sequence at the 5′ end, which may decrease separation of the double-stranded portion of the siRNA. In one embodiment, the RNAi agent specific to KRAS can be a double-stranded RNA having any one or more of these qualities.

[0190] The term “double-stranded RNA” or “dsRNA,” as used herein, refers to a RNAi agent comprising a first and a second strand; e.g., a composition that includes an RNA molecule or complex of molecules having a hybridized duplex region (i.e., a region where the nucleotide bases from the first strand and the second strand are paired) that comprises two anti-parallel and substantially complementary nucleic acid strands, which will be referred to as having “sense” and “antisense” orientations with respect to a target RNA. The antisense strand, with respect to the mRNA target, is also called the “guide” strand, and the sense strand is also called the “passenger” or “anti-guide” strand. The passenger strand can include at least one or more of the following: one or more extra nucleotides (e.g., a bulge or 1 nt loop) compared to the other strand, a nick, a gap, a mismatch, etc., compared to the other strand. In various embodiments, the RNAi agent comprises a first strand and a second strand. In various embodiments, and as used herein and as is clear by context, terminology referring to the first strand refers to the sense strand and the second strand refers to the anti-sense strand as listed in any Table herein. In other embodiments, and as used herein and as is clear by context, the first strand refers to the anti-sense strand, and the second strand refers to the sense strand as listed in any Table herein.

[0191] The duplex region can be of any length that permits specific degradation of a desired target RNA through a RISC pathway, but will typically range from 9 to 36 base pairs (“bp”) in length, e.g., 15-30 bp in length. Considering a duplex between 9 and 36 bp, the duplex can be any length in this range, for example, 9, 10, 11, 12, 13, 14, 15, 16, 17, 18, 19, 20, 21, 22, 23, 24, 25, 26, 27, 28, 29, 30, 31, 32, 33, 34, 35, or 36 bp and any sub-range therebetween, including, but not limited to 15-30 bp, 15-26 bp, 15-23 bp, 15-22 bp, 15-21 bp, 15-20 bp, 15-19 bp, 15-18 bp, 15-17 bp, 18-30 bp, 18-26 bp, 18-23 bp, 18-22 bp, 18-21 bp, 18-20 bp, 19-30 bp, 19-26 bp, 19-23 bp, 19-22 bp, 19-21 bp, 19-20 bp, 19 bp, 20-30 bp, 20-26 bp, 20-25 bp, 20-24 bp, 20-23 bp, 20-22 bp, 20-21 bp, 20 basepairs, 21-30 bp, 21-26 bp, 21-25 bp, 21-24 bp, 21-23 bp, 21-22 bp, 21 bp, 22 bp, or 23 bp. The dsRNAs generated in the cell by processing with Dicer and similar enzymes are generally in the range of about 19 to about 22 bp in length. One strand of the duplex region of a dsRNA comprises a sequence that is substantially complementary to a region of a target RNA. The two strands forming the duplex structure can be from a single RNA molecule having at least one self-complementary duplex region, or can be formed from two or more separate RNA molecules that hybridize to form the duplex. Where the duplex region is formed from two self-complementary regions of a single molecule, the molecule can have a duplex region separated by a single-stranded chain of nucleotides (herein referred to as a “hairpin loop”, e.g., such as found in an shRNA construct) between the 3′-end of one strand and the 5′-end of the respective other strand forming the duplex structure. The hairpin loop can comprise at least one unpaired nucleotide; in some embodiments the hairpin loop can comprise at least 3, at least 4, at least 5, at least 6, at least 7, at least 8, at least 9, at least 10, at least 20, at least 23 or more unpaired nucleotides. Where the two substantially complementary strands of a dsRNA are comprised by separate RNA molecules, those molecules need not, but can, be covalently connected. Where the two strands are connected covalently by a hairpin loop, the construct is generally referred to herein and in the art as a “shRNA”. Where the two strands are connected covalently by means other than a hairpin loop, the connecting structure is referred to as a “linker.”

[0192] RNAi Agents to KRAS Comprising Mismatches from the Disclosed Sequences

[0193] Various specific embodiments of a RNAi agent to KRAS are disclosed herein; example sequences are provided in Tables 1, 2 and 3. Specific embodiments of the present disclosure include RNAi agents which comprise sequences differing by 0, 1, 2, or 3 nt (nucleotides) or by [basepair(s)] (e.g., with 0, 1, 2 or 3 mismatches) from any of the RNAi agents listed in Tables 1 to 6, and modified and unmodified variants thereof.

[0194] A mismatch is defined herein as a difference between the base sequence or length when two sequences are maximally aligned and compared. A mismatch is defined as a position wherein the base of one sequence does not match the base of the other sequence. Thus, a mismatch is counted, for example, if a position in one sequence has a particular base (e.g., A), and the corresponding position on the other sequence has a different base (e.g., G). Substitution of A, for example, with T, C, G or U would constitute a mismatch. Substitution of G with T, A, C or U would also constitute a mismatch. Substitution of C with T, G, A or U would also constitute a mismatch. Substitution of U with A, C or G would constitute a mismatch. Note, however, that on a given strand, a U can be replaced by T (either as RNA or, preferably, DNA, e.g., 2′-deoxy-thymidine); the replacement of a U with a T is not a mismatch as used herein, as either U or T can pair with A on the opposite strand. The RNAi agent can thus comprise one or more DNA bases, e.g., T. In some cases, in a portion or portions of the RNAi agent, DNA can be used in place of RNA (e.g., in the seed region), to form a DNA-RNA hybrid. See, for example, Yamato et al. 2011 cancer Gene Ther. 18: 587-597. No mismatch is counted between a DNA portion(s) of the RNAi agent and the corresponding target mRNA if basepairing occurs (e.g., between A, G, C, or T in the DNA portion, and the corresponding U, C, G, or A, respectively in the mRNA).

[0195] A mismatch is also counted, e.g., if a position in one sequence has a base (e.g., A), and the corresponding position on the other sequence has no base (e.g., that position is an abasic nucleotide, which comprises a phosphate-sugar backbone but no base). A single-stranded nick in either sequence (or in the sense or anti-sense strand) is not counted as mismatch. Thus, as a non-limiting example, no mismatch would be counted if one sequence comprises the sequence AG, but the other sequence comprises the sequence AG with a single-stranded nick between the A and the G. A nucleotide modification in the sugar or phosphate is also not considered a mismatch. Thus, if one sequence comprises a C, and the other sequence comprises a modified C (e.g., 2′-modification) at the same position, no mismatch would be counted.

[0196] Thus, no mismatches are counted if modifications are made to the sugar, phosphate, or backbone of the RNAi agent without modifying the base. Thus, a sequence of GGACGAAUAUGAUCCAACA (SEQ ID NO: 1) as an RNA and the same sequence as a PNA (peptide nucleic acid) (or TNA or GNA or FANA) have 0 mismatches from each other.

[0197] It is also noted that the sequences of the RNAi agents in Tables 1 to 6 include sequences which comprise modifications, as detailed in Table 3. It is noted that dTdT (2′-deoxy-thymidine-5′-phosphate and 2′-deoxy-thymidine-5′-phosphate), or in some cases, TT or UU, is added as a cap or extension to both 3′-ends, but this cap or extension is not included in the calculation of the total number of mismatches. In addition, in Table 3, a modified sequence can comprise one or more modifications from the corresponding unmodified sequence. In this case, lowercase “c” represents 2′-O-methylcytidine-5′-phosphate, and lowercase “u” represents 2′-O-methyluridine-5′-phosphate. Uppercase “A”, “C”, “G” and “U” represent the un-modified adenosine-5′-phosphate, cytidine-5′-phosphate, guanosine-5′-phosphate, and uridine-5′-phosphate, respectively. The substitution of modified c for unmodified C does not count as a mismatch in numbering the 0, 1, 2, or 3 mismatches between sequences. This nomenclature is used for all sequences in Tables 1 to 6. Thus, an equal number of mismatches would be calculated (a) between a test sequence and a modified sequence, and (b) between the same test sequence and the corresponding unmodified sequence from the KRAS gene, and (c) between a modified sequence and a differently modified sequence which have the same base sequence.

[0198] In one particular embodiment, the present disclosure comprises a RNAi agent comprising a anti-sense strand comprising at least 15 to 19 contiguous nucleotides differing by 0, 1, 2, or 3 nt from the sequence of the anti-sense strand of: any of the RNAi agents listed in Tables 1 to 6, and modified and unmodified variants thereof.

[0199] The present disclosure pertains to “modified and unmodified variants” of the disclosed sequences.

[0200] An “unmodified variant” of a particular sequence is the corresponding portion of KRAS without any modifications. Example modified sequences are listed in Tables 1, 2 and 3. The “unmodified variants” of the sequences of Tables 1 to 6 have the identical sequence, without base modifications or terminal dTdT. A given sequence and an “unmodified variant” of it differ by 0 nt (and have no mismatches).

[0201] A “modified variant” of a particular sequence comprises one or more (or one or more fewer) modifications to the backbone, sugar, phosphate or base, but do not have any base substitutions (e.g., G for C, or A for G); thus a given sequence and a modified variant thereof differ by 0 nt (and have no mismatches). As another example, a given sequence as a RNA and the same sequence as a PNA are modified variants of each other and differ by 0 nt (and have no mismatches). Similarly, the same sequence (with no base substitutions) as a locked nucleic acid (LNA), Morpholino, threose nucleic acid (TNA), or glycol nucleic acid (GNA) would be a modified variant which has 0 mismatches.

[0202] As detailed below, substituting a single nucleotide at a given position with a modified version of the same nucleotide would produce a modified variant (with 0 mismatches).

[0203] In another particular embodiment, the RNAi agent comprises a sense strand comprising at least 15 contiguous nucleotides differing by 0, 1, 2, or 3 nt from the sense strand of any of the RNAi agents listed in Tables 1 to band modified and unmodified variants thereof.

[0204] RNAi agents to KRAS of the present disclosure can be used in RNA interference.

[0205] Modifications of RNAi Agent Sequences

[0206] The present disclosure encompasses both unmodified sequences and example modified sequences, such as those disclosed in Tables 1, 2 and 3.

[0207] The present disclosure further encompasses any other modification of a disclosed sequence (e.g., a modified variant).

[0208] For example, the disclosure encompasses a RNAi agent with a substitution of a single nucleotide at a given position with a modified version of the same nucleotide. Thus a nucleotide (A, G, C or U) can be replaced by the corresponding 5-fluorouracil, 5-bromouracil, 5-chlorouracil, 5-iodouracil, hypoxanthine, xantine, 4-acetylcytosine, 5-(carboxyhydroxylmethyl) uracil, 5-carboxymethylaminomethyl-2-thiouridine, 5-carboxymethylaminomethyluracil, dihydrouracil, beta-D-galactosylqueosine, inosine, N6-isopentenyladenine, 1-methylguanine, 1-methylinosine, 2,2-dimethylguanine, 2-methyladenine, 2-methylguanine, 3-methylcytosine, 5-methylcytosine, N6-adenine, 7-methylguanine, 5-methylaminomethyluracil, 5-methoxyaminomethyl-2-thiouracil, beta-D-mannosylqueosine, 5′-methoxycarboxymethyluracil, 5-methoxyuracil, 2-methylthio-N6-isopentenyladenine, uracil-5-oxyacetic acid (v), wybutoxosine, pseudouracil, queosine, 2-thiocytosine, 5-methyl-2-thiouracil, 2-thiouracil, 4-thiouracil, 5-methyluracil, uracil-5-oxyacetic acid methylester, uracil-5-oxyacetic acid (v), 5-methyl-2-thiouracil, 3-(3-amino-3-N-2-carboxypropyl) uracil, (acp3) w, or 2,6-diaminopurine.

[0209] Additional modified variants include the addition of any other moiety (e.g., a radiolabel or other tag or conjugate) to the RNAi agent; provided that the base sequence is identical, the addition of other moieties produces a “modified variant” (with no mismatches).

[0210] Various sets of modifications can be used. These include the following formats, which are used in various screens disclosed herein.

### A22S26

[0211] A22 indicates that All UA as 2′-OMe-U A and all CA as 2′-OMe-C A
S26 indicates that All U as 2′-OMe-U and all C as 2′-OMe-C
All 3′ overhangs as 2′-OMe-U 2′-OMe-U

[0212] In addition to these modifications and patterns (e.g, formats) for modifications, other modifications or sets of modifications of the sequences provided can be generated using common knowledge of nucleic acid modification.

[0213] RNA Interference

[0214] RNA interference (RNAi) is a post-transcriptional, targeted gene-silencing technique that uses double-stranded RNA (dsRNA) to degrade messenger RNA (mRNA) containing the same sequence as the dsRNA. The process of RNAi occurs when ribonuclease III (Dicer) cleaves the longer dsRNA into shorter fragments called siRNAs. siRNAs (small interfering RNAs) produced by Dicer are typically about 21 to 23 nucleotides long and comprise about 19 base pair duplexes (though artificial siRNAs or RNAi agents can be shorter or longer, and/or blunt-ended, and/or comprises one or more endcaps). The smaller RNA segments then mediate the degradation of the target mRNA. Dicer has also been implicated in the excision of 21- and 22-nucleotide small temporal RNAs (stRNAs) from precursor RNA of conserved structure that are implicated in translational control. Hutvagner et al. 2001 Science 293: 834. The RNAi response also features an endonuclease complex, commonly referred to as an RNA-induced silencing complex (RISC), which mediates cleavage of single-stranded mRNA complementary to the anti-sense strand of the RNAi agent. Cleavage of the target RNA takes place in the middle of the region complementary to the anti-sense strand of the siRNA duplex.

[0215] In one aspect, an RNA interference agent includes a single-stranded RNA that interacts with a target RNA sequence to direct the cleavage of the target RNA. Without wishing to be bound by theory, the present disclosure contemplates a long double-stranded RNA introduced into plants and invertebrate cells is broken down into siRNA by a Type III endonuclease known as Dicer. Sharp et al. 2001 Genes Dev. 15:485. Dicer, a ribonuclease-III-like enzyme, processes the dsRNA into 19-23 base pair short interfering RNAs with characteristic two base 3′ overhangs. Bernstein, et al. 2001 Nature 409:363. The siRNAs are then incorporated into an RNA-induced silencing complex (RISC) where one or more helicases unwind the siRNA duplex, enabling one of the now unpaired siRNA strands to act as a “guide” strand to guide target recognition. Nykanen, et al. 2001 Cell 107:309. Upon binding of the antisense guide strand to the appropriate target mRNA, one or more endonucleases within the RISC cleaves the target to induce silencing. Elbashir, et al. 2001 Genes Dev. 15:188. Thus, in one aspect the present disclosure relates to a single-stranded RNA that promotes the formation of a RISC complex to effect silencing of the target gene.

[0216] Kits for RNAi synthesis are commercially available, e.g., from New England Biolabs and Ambion.

[0217] The RNAi agent(s) of the present disclosure target (e.g., bind to, anneal to, etc.) the KRAS mRNA. The use of the RNAi agent to KRAS results in a decrease of KRAS activity, level and/or expression, e.g., a “knock-down” or “knock-out” of the target gene or target sequence. Particularly, in one embodiment, in the case of a disease state characterized by over-expression or hyper-activity of KRAS, administration of a RNAi agent to KRAS knocks down the KRAS target enough to restore a normal level of KRAS activity.

[0218] A suitable RNAi agent can be selected by any process known in the art or conceivable by one of ordinary skill in the art. For example, the selection criteria can include one or more of the following steps: initial analysis of the KRAS gene sequence and design of RNAi agents; this design can take into consideration sequence similarity across species (human, cynomolgus, mouse, etc.) and dissimilarity to other (non-KRAS) genes; screening of RNAi agents in vitro (e.g., at 10 nM in RKO cells); determination of EC50 in RKO cells; determination of viability of cells treated with RNAi agents, including insensitive cells which do not require KRAS for survival, or sensitive cells, which do require KRAS for survival; testing with human PBMC (peripheral blood mononuclear cells), e.g., to test levels of TNF-alpha to estimate immunogenicity, wherein immunostimulatory sequences are less desired; testing in human whole blood assay, wherein fresh human blood is treated with an RNAi agent and cytokine/chemokine levels are determined [e.g., TNF-alpha (tumor necrosis factor-alpha) and/or MCP1 (monocyte chemotactic protein 1)], wherein Immunostimulatory sequences are less desired; determination of gene knockdown in vivo using subcutaneous tumors in test animals; KRAS target gene modulation analysis, e.g., using a pharmacodynamic (PD) marker, for example, other factors whose expression is affected by KRAS, wherein KRAS knockdown leads to a dose-dependent reduction of abundance of those components; and optimization of specific modifications of the RNAi agents.

[0219] The dsRNA molecules (RNAi agents) described herein are thus useful in RNA interference of KRAS.

[0220] Features of a RNAi Agent: Sense Strand, Antisense Strand and (Optional) Overhangs

[0221] In various embodiments, the RNAi agents comprise a first strand and a second strand, e.g., a sense strand and an antisense strand (or an antisense and a sense strand) and, optionally, one or both ends of the duplex containing unpaired nucleotides referred to herein as overhangs.

[0222] The term “antisense strand” refers to the strand of a RNAi agent which includes a region that is substantially complementary to a target sequence. As used herein, the term “region of complementarity” refers to the region on the antisense strand that is substantially complementary to a sequence, for example a target sequence, as defined herein. Where the region of complementarity is not fully complementary to the target sequence, the mismatches may be in the internal or terminal regions of the molecule. Generally, the most tolerated mismatches are in the terminal regions, e.g., within 5, 4, 3, or 2 nucleotides of the 5′ and/or 3′ terminus.

[0223] The term “sense strand,” as used herein, refers to the strand of a RNAi agent that includes a region that is substantially complementary to a region of the antisense strand as that term is defined herein.

[0224] The sequence of a gene may vary from individual to individual, especially at wobble positions within the coding segment, or in the untranslated region; individuals may also differ from each other in coding sequence, resulting in additional differences in mRNA. The sequence of the sense and antisense strands of the RNAi agent can thus be designed to correspond to that of an individual patient, if and where needed. RNAi agents can also be modified in sequence to reduce immunogenicity, binding to undesired mRNAs (e.g., “off-target effects”) or to increase stability in the blood. These sequence variants are independent of chemical modification of the bases or 5′ or 3′ or other end-caps of the RNAi agents.

[0225] The RNAi agents can also have overhangs of 0, 1, or 2 overhangs; in the case of a 0 nt overhang, they are blunt-ended. A RNAi agent can have 0, 1 or 2 blunt ends. In a “blunt-ended RNAi agent” both strands terminate in a base-pair; thus a blunt-ended molecule lacks either 3′ or 5′ single-stranded nucleotide overhangs.

[0226] The RNAi agents can comprise overhang(s), blunt end(s), and/or 5′ and 3′ endcap(s).

[0227] As used herein, the term “overhang” or “nucleotide overhang” refer to at least one unpaired nucleotide that protrudes from the end of at least one of the two strands of the duplex structure of a RNAi agent. For example, when a 3′-end of one strand of a dsRNA extends beyond the 5′-end of the other strand, or vice versa, the unpaired nucleotide(s) form the overhang. A dsRNA can comprise an overhang of at least one nucleotide; alternatively the overhang can comprise at least two nucleotides, at least three nucleotides, at least four nucleotides, at least five nucleotides or more. An overhang can comprise or consist of a nucleotide/nucleoside analog, including a deoxynucleotide/nucleoside. The overhang(s) may be on the sense strand, the antisense strand or any combination thereof. Furthermore, the nucleotide(s) of an overhang can be present on the 5′ end, 3′ end or both ends of either an antisense or sense strand of a dsRNA. The RNAi agent can also optionally comprise a cap. The term “Cap” and the like include a chemical moiety attached to the end of a double-stranded nucleotide duplex, but is used herein to exclude a chemical moiety that is a nucleotide or nucleoside. A “3′ Cap” is attached at the 3′ end of a nucleotide or oligonucleotide and protects the molecule from degradation, e.g., from nucleases, such as those in blood serum or intestinal fluid. A 3′ cap can replace a TT or UU dinucleotide at the end of a blunt-ended RNAi agent. In one embodiment, 3′ end caps are as disclosed in, for example, WO 2005/021749 and WO 2007/128477. A “5′ cap” is attached at the 5′ end of a nucleotide or oligonucleotide. A cap should not interfere (or unduly interfere) with RNAi activity.

[0228] The present disclosure thus contemplates a RNAi agent specific to KRAS comprising an antisense strand (which may be contiguous or connected via a linker or loop) in a RNAi agent. In a more specific embodiment, an RNAi agent comprises an antisense strand and a sense strand which together comprise a double-stranded or complementary region. In one embodiment, it can also optionally comprise one or two overhangs and/or one or two caps. The RNAi agent is used to induce RNA interference of the target gene, KRAS.

[0229] Target and Complementary Sequences

[0230] The RNAi agents of the present disclosure target (e.g., specifically bind to, anneal to, etc.) the mRNA encoding the gene KRAS. The use of the RNAi agent specific to KRAS results in a decrease of KRAS activity, level and/or expression, e.g., a “knock-down” or “knock-out” of the target gene or target sequence. Particularly in one embodiment, in the case of a disease state characterized by over-expression or hyper-activity of KRAS, administration of a RNAi agent to KRAS knocks down the KRAS gene enough to restore a normal level of KRAS activity or expression.

[0231] In one embodiment, the first or second strand of the RNAi comprises a sequence complementary to that of the target nucleic acid, KRAS.

[0232] As used herein, the term “strand comprising a sequence” refers to an oligonucleotide comprising a chain of nucleotides that is described by the sequence referred to using the standard nucleotide nomenclature.

[0233] As used herein, “target sequence” or “target gene” refer to a contiguous portion of the nucleotide sequence of an mRNA molecule formed during the transcription of a gene, e.g., a KRAS gene, including mRNA that is a product of RNA processing of a primary transcription product. The target portion of the sequence will be at least long enough to serve as a substrate for iRNA-directed cleavage at or near that portion. For example, the target sequence will generally be from 9-36 nucleotides (“nt”) in length, e.g., 15-30 nt in length, including all sub-ranges therebetween. As non-limiting examples, the target sequence can be from 15-30 nt, 15-26 nt, 15-23 nt, 15-22 nt, 15-21 nt, 15-20 nt, 15-19 nt, 15-18 nt, 15-17 nt, 18-30 nt, 18-26 nt, 18-23 nt, 18-22 nt, 18-21 nt, 18-20 nt, 19-30 nt, 19-26 nt, 19-23 nt, 19-22 nt, 19-21 nt, 19-20 nt, 19 nt, 20-30 nt, 20-26 nt, 20-25 nt, 20-24 nt, 20-23 nt, 20-22 nt, 20-21 nt, 20 nt, 21-30 nt, 21-26 nt, 21-25 nt, 21-24 nt, 21-23 nt, or 21-22 nt, 21 nt, 22 nt, or 23 nt. The sense and antisense strands of the RNAi comprise a sequence complementary to that of the target nucleic acid, KRAS.

[0234] As used herein, and unless otherwise indicated, the term “complementary” refers to the ability of an oligonucleotide or polynucleotide comprising a first nucleotide sequence to hybridize and form a duplex structure under certain conditions with an oligonucleotide or polynucleotide comprising a second nucleotide sequence. Such conditions can, for example, be stringent, e.g., 400 mM NaCl, 40 mM PIPES pH 6.4, 1 mM EDTA, 50° C. or 70° C. for 12-16 hours followed by washing. Other conditions, such as physiologically relevant conditions as may be encountered inside an organism, can apply. The skilled person will be able to determine the set of conditions most appropriate for a test of complementarity of two sequences in accordance with the ultimate application of the hybridized nucleotides.

[0235] Complementary sequences within a RNAi agent, e.g., within a dsRNA as described herein, include base-paired oligonucleotides or polynucleotides comprising a first nucleotide sequence to an oligonucleotide or polynucleotide comprising a second nucleotide sequence over the entire length of one or both nucleotide sequences. Such sequences can be referred to as “fully complementary” with respect to each other herein. However, where a first sequence is referred to as “substantially complementary” with respect to a second sequence herein, the two sequences can be fully complementary, or they may form one or more, but generally not more than 5, 4, 3 or 2 mismatched base pairs upon hybridization for a duplex up to 30 base pairs, while retaining the ability to hybridize under the conditions most relevant to their ultimate application, e.g., inhibition of gene expression via a RISC pathway. However, where two oligonucleotides are designed to form, upon hybridization, one or more single-stranded overhangs, such overhangs shall not be regarded as mismatches with regard to the determination of complementarity. For example, a dsRNA comprising one oligonucleotide 21 nucleotides in length and another oligonucleotide 23 nucleotides in length, wherein the longer oligonucleotide comprises a sequence of 21 nucleotides that is fully complementary to the shorter oligonucleotide, may yet be referred to as “fully complementary” for the purposes described herein. The term “overhang” describes an unpaired nucleotide at the 3′ or 5′ end of a double-stranded nucleotide duplex, as described above. In one embodiment, the overhang is 1 to 4 nt long and is on the 3′ end.

[0236] “Complementary” sequences, as used herein, may also include, or be formed entirely from, non-Watson-Crick base pairs and/or base pairs formed from non-natural and modified nucleotides, in as far as the above requirements with respect to their ability to hybridize are fulfilled. Such non-Watson-Crick base pairs includes, but are not limited to, Wobble or Hoogstein base pairing. The terms “complementary,” “fully complementary” and “substantially complementary” herein may furthermore be used with respect to the base matching between the sense strand and the antisense strand of a dsRNA, or between the antisense strand of a RNAi agent and a target sequence, as will be understood from the context of their use. As used herein, a polynucleotide that is “substantially complementary to at least part of” a messenger RNA (mRNA) refers to a polynucleotide that is substantially complementary to a contiguous portion of the mRNA of interest (e.g., an mRNA encoding KRAS). For example, a polynucleotide is complementary to at least a part of a KRAS mRNA if the sequence is substantially complementary to a non-interrupted portion of an mRNA encoding KRAS.

[0237] Thus, the RNAi agent of the present disclosure is complimentary or substantially complimentary to a target sequence in the target KRAS and is double-stranded, comprising a sense and an antisense strand (which can be contiguous, linked via a loop, or otherwise joined), where the double-stranded region an be 9 to 36 bp long (particularly for example, 19-22 bp or 19-23 bp long), and can furthermore optionally comprise a 3′ or 5′ overhang, and the RNAi agent can furthermore comprise a 3′ cap. The RNAi agent mediates RNA interference, down-regulating or inhibiting the level, expression and/or activity of KRAS, and/or establishing or re-establishing an approximately normal level of KRAS and/or KRAS activity, or other biological function related to KRAS.

[0238] Thus, the RNAi agent of the present disclosure is complimentary or substantially complimentary to a target sequence in the target KRAS and is double-stranded, comprising a sense and an antisense strand (which can be contiguous, linked via a loop, or otherwise joined), where the double-stranded region an be 9 to 36 bp long (particularly for example, 19-22 bp or 19-23 bp long), and can furthermore optionally comprise a 3′ or 5′ overhang, and the RNAi agent can furthermore comprise a 3′ cap. The RNAi agent mediates RNA interference, down-regulating or inhibiting the level, expression and/or activity of KRAS, and/or establishing or re-establishing an approximately normal level of KRAS activity or expression.

[0239] The term “double-stranded RNA” or “dsRNA,” as used herein, refers to an RNAi agent comprising a first and a second strand; e.g., a composition that includes an RNA molecule or complex of molecules having a hybridized duplex region that comprises two anti-parallel and substantially complementary nucleic acid strands, which will be referred to as having “sense” and “antisense” orientations with respect to a target RNA. The antisense strand, with respect to the mRNA target, is also called the “guide” strand, and the sense strand is also called the “passenger” strand. As used herein, depending on the context, the “first” strand can be the guide or antisense strand, and the “second” strand can be the passenger or sense strand. Also as used herein, again depending on the context, the “first” strand can be the passenger or sense strand, and the “second” strand can be the guide or antisense. The passenger strand can include at least one or more of the following: one or more extra nucleotides (e.g., a bulge or 1 nt loop) compared to the other strand, a nick, a gap, etc., compared to the other strand. In various embodiments, the first strand is the sense strand and the second strand is the anti-sense strand. In other embodiments, the first strand is the anti-sense strand, and the second strand is the sense strand.

[0240] The duplex region can be of any length that permits loading into the RISC complex and subsequent specific degradation of a desired target RNA through a RISC pathway, but will typically range from 9 to 36 base pairs (“bp”) in length, e.g., 15-30 base pairs in length. Considering a duplex between 9 and 36 base pairs, the duplex can be any length in this range, for example, 9, 10, 11, 12, 13, 14, 15, 16, 17, 18, 19, 20, 21, 22, 23, 24, 25, 26, 27, 28, 29, 30, 31, 32, 33, 34, 35, or 36 bp and any sub-range therebetween, including, but not limited to 15-30 base pairs, 15-26 bp, 15-23 bp, 15-22 bp, 15-21 bp, 15-20 bp, 15-19 bp, 15-18 bp, 15-17 bp, 18-30 bp, 18-26 bp, 18-23 bp, 18-22 bp, 18-21 bp, 18-20 bp, 19-30 bp, 19-26 bp, 19-23 bp, 19-22 bp, 19-21 bp, 19-20 bp, 19 bp, 20-30 bp, 20-26 bp, 20-25 bp, 20-24 bp, 20-23 bp, 20-22 bp, 20-21 bp, 20 bp, 21-30 bp, 21-26 bp, 21-25 bp, 21-24 bp, 21-23 bp, 21-22 bp, 21 bp, 22 bp, or 23 bp.

[0241] The dsRNAs generated in the cell by processing with Dicer and similar enzymes are generally in the range of about 19 to about 22 base pairs in length, although artificial RNAi agents can be synethesized or made by any method known in the art. One strand of the duplex region of a dsRNA comprises a sequence that is substantially complementary to a region of a target RNA. The two strands forming the duplex structure can be from a single RNA molecule having at least one self-complementary duplex region, or can be formed from two or more separate RNA molecules that hybridize to form the duplex. Where the duplex region is formed from two self-complementary regions of a single molecule, the molecule can have a duplex region separated by a single stranded chain of nucleotides (herein referred to as a “hairpin loop”, e.g., such as found in an shRNA construct) between the 3′-end of one strand and the 5′-end of the respective other strand forming the duplex structure. The hairpin loop can comprise at least one unpaired nucleotide; in some embodiments the hairpin loop can comprise at least 3, at least 4, at least 5, at least 6, at least 7, at least 8, at least 9, at least 10, at least 20, at least 23 or more unpaired nucleotides. Where the two substantially complementary strands of a dsRNA are comprised by separate RNA molecules, those molecules need not, but can be covalently connected. Where the two strands are connected covalently by a hairpin loop, the construct is generally referred to herein and in the art as a “shRNA”. Where the two strands are connected covalently by means other than a hairpin loop, the connecting structure is referred to as a “linker.” The term “siRNA” is also used herein to refer to a dsRNA as described above.

[0242] RNAi Agents Lowering or Normalizing KRAS Level, Expression and/or Activity

[0243] RNAi agents for targeting KRAS include those which bind to a KRAS sequence provided herein and which work to reduce KRAS through a RNAi mechanism. Example RNAi agents (e.g., siRNAs) to KRAS are provided, e.g., in Table 1.

[0244] Any method known in the art can be use to measure changes in KRAS activity, level, and/or expression induced by a KRAS RNAi agent. Measurements can be performed at multiple timepoints, prior to, during and after administration of the RNAi agent, to determine the effect of the RNAi agent.

[0245] The RNAi agents of the present disclosure silence, inhibit the expression of, down-regulate the expression of, and/or suppress the expression of KRAS, such that an approximately normal level of KRAS activity or expression is restored.

[0246] In addition, in various embodiments, depending on the disease condition and biological context, it is acceptable to use the RNAi agents of the present disclosure to establish a level of KRAS expression, activity and/or level which is below the normal level, or above the normal level, depending on the therapeutic outcome that is desired.

[0247] Any method known in the art can be use to measure changes in KRAS activity, level and/or expression induced by a KRAS siRNA. Measurements can be performed at multiple timepoints, prior to, during and after administration of the siRNA, to determine the effect of the siRNA.

[0248] The terms “silence,” “inhibit the expression of,” “down-regulate the expression of,” “suppress the expression of,” and the like, in so far as they refer to a KRAS gene, herein refer to the at least partial suppression of the expression of a KRAS gene, as manifested by a reduction of the amount of KRAS mRNA which may be isolated from or detected in a first cell or group of cells in which a KRAS gene is transcribed and which has or have been treated such that the expression of a KRAS gene is inhibited, as compared to a second cell or group of cells substantially identical to the first cell or group of cells but which has or have not been so treated (control cells). The degree of inhibition is usually expressed in terms of

$$\frac{\begin{matrix}( mRNA in control cells ) - \\ ( mRNA in treated cells )\end{matrix}}{( mRNA in control cells )} \cdot 100 \% \qquad Equation 1$$

[0249] Alternatively, the degree of inhibition may be given in terms of a reduction of a parameter that is functionally linked to KRAS gene expression, e.g., the amount of protein encoded by a KRAS gene, alteration in expression of a protein whose expression is dependent on KRAS, etc. In principle, KRAS gene silencing may be determined in any cell expressing KRAS, either constitutively or by genomic engineering, and by any appropriate assay. However, when a reference or control is needed in order to determine whether a given RNAi agent inhibits the expression of KRAS by a certain degree and therefore is encompassed by the instant disclosure, the assays provided in the Examples below shall serve as such reference.

[0250] For example, in certain instances, expression of KRAS is suppressed by at least about 10%, 15%, 20%, 25%, 30%, 35%, 40%, 45%, or 50% by administration of a RNAi agent featured in the present disclosure. In some embodiments, KRAS is suppressed by at least about 60%, 70%, or 80% by administration of a RNAi agent featured in the present disclosure. In some embodiments, KRAS is suppressed by at least about 85%, 90%, or 95% or more by administration of a RNAi agent, as described herein. In one embodiment, the degree of KRAS suppression is determined by loss of full length KRAS mRNA in a treated cell compared to an untreated cell. In one embodiment, the degree of KRAS suppression is determined with a phenotypic assay that monitors loss of proliferative activity and/or cell death. Other embodiments are as provided in the Examples.

[0251] The ability of a RNAi agent to suppress KRAS can be first tested in vitro (e.g., using test cells such as RKO).

[0252] RNAi agents which can suppress KRAS in vitro can then be tested for immunostimulation using, for example, a PBMC (peripheral blood mononuclear cell) assay. RNAi agents can also be tested in animal tests. Test and control animals include those which over-express or under-express KRAS, as described in, for example, Hummer et al. 2005 J. Am. Soc. Nephrol. 16: 3160-3166; Randrianarison et al. 2007 Am. J. Physiol. Lung Cell. Mol. Physiol. 294: 409-416; Cao et al. 2006 Am. J. Physiol. Renal Physiol., and references cited therein. RNAi agents which suppress or alter the level, activity and/or expression of KRAS can be used in medicaments to treat various KRAS-related diseases.

[0253] By “lower” in the context of KRAS or a symptom of a KRAS-related disease is meant a statistically significant decrease in such level. The decrease can be, for example, at least 10%, at least 20%, at least 30%, at least 40% or more. If, for a particular disease, or for an individual suffering from a particular disease, the levels or expression of KRAS are elevated, treatment with a KRAS RNAi agent of the present disclosure can particularly reduce the level or expression of KRAS to a level considered in the literature as within the range of normal for an individual without such disorder, or to a level that reduces or ameliorates symptoms of a disease. The level or expression of KRAS can be measured by evaluation of mRNA (e.g., via Northern blots or PCR), or protein (e.g., Western blots). The effect of a RNAi agent on KRAS expression can be determined by measuring KRAS gene transcription rates (e.g., via Northern blots; or reverse transcriptase polymerase chain reaction or real-time polymerase chain reaction).

[0254] As used herein, “down-regulates” refers to any statistically significant decrease in a biological activity and/or expression of KRAS, including full blocking of the activity (i.e., complete inhibition) and/or expression. For example, “down-regulation” can refer to a decrease of at least about 10, 20, 30, 40, 50, 60, 70, 80, 90 or 100% in KRAS level, activity and/or expression.

[0255] As used herein, the term “inhibit” or “inhibiting” KRAS refers to any statistically significant decrease in biological level, activity and/or expression of KRAS, including full blocking of the activity and/or expression. For example, “inhibition” can refer to a decrease of at least about 10, 20, 30, 40, 50, 60, 70, 80, 90 or 100% in KRAS level, activity and/or expression. As used herein, the term “inhibit” similarly refers to a significant decrease in level, activity and/or expression, while referring to any other biological agent or composition.

[0256] By “level”, it is meant that the KRAS RNAi agent can alter the level of KRAS, e.g., the level of KRAS mRNA or the level of KRAS protein, or the level of activity of KRAS.

[0257] Some diseases, such as types of a proliferative disease, including without limitation a solid or liquid cancer, adenocarcinoma, colorectal cancer, advanced and/or metastatic colorectal cancer, colon cancer, lung, non-small cell lung cancer and lung adenocarcinoma, acute myelogenous lung, bladder, brain, breast, cervical, endometrial, gastric, head and neck, kidney, leukemia, myelodysplastic syndrome, myeloid leukemia, liver, melanoma, ovarian, pancreatic, prostate, testicular, thyroid cancers, and cardio-facio-cutaneous (CFC) syndrome and Noonan syndrome, and similar and related diseases, are characterized by a KRAS mutation or excessive KRAS abundance or activity. Particularly in one embodiment, in the case of a disease characterized by over-expression and/or hyper-activity of KRAS, administration of a RNAi agent to KRAS reduces the level, expression and/or activity of KRAS. Thus, in various embodiments, administration of a RNAi agent to KRAS particularly establishes or re-establishes a normal or approximately normal level of KRAS activity, expression and/or level.

[0258] By “normal” or “approximately normal” in terms of level, expression and/or activity, is meant at least: about 50%, about 60%, about 70%, about 80%, about 90%, and/or about 100%; and/or no more than: about 100%, about 120%, about 130%, about 140%, or about 150% of the level, expression or activity of KRAS in a healthy cell, tissue, or organ. This can be measured using, for example, lung or kidney homogenates, as described in Gambling et al. 2004 Kidney Intl. 65: 1774-1781. Particularly in one embodiment, administration of the appropriate amount of the appropriate KRAS RNAi agent restores KRAS level, activity and/or expression to about 50% to about 150%, more particularly about 60% to about 140%, more particularly to about 70% to about 130%, more particularly to about 80% to about 120%, more particularly to about 90% to about 110%, and most particularly to about 100% of that of a healthy cell, tissue or organ. Administration of a KRAS RNAi to a patient with a KRAS-related disease thus particularly restores the level, activity, and/or expression of KRAS and the level of Na⁺ reabsorption to an approximately normal level, as determined by direct measurements of KRAS mRNA or protein levels, or indirect determinations. In addition, the preferred target amount of KRAS level, expression and/or activity after KRAS RNAi agent administration can be calculated to take into account any other perturbations in a KRAS-related pathway. For example, if another factor in a KRAS-related pathway is either over- or under-expressed, KRAS level, expression or activity may be modulated to attain a more normal state.

[0259] In addition, in various embodiments, depending on the disease condition and biological context, it is acceptable to use the RNAi agents of the present disclosure to establish a level of KRAS expression, activity and/or level which is below the normal level, or above the normal level.

[0260] Types of RNAi Agents and Modification Thereof

[0261] The use of RNAi agents or compositions comprising an antisense nucleic acid to down-modulate the expression of a particular protein in a cell is well known in the art. A RNAi agent comprises a sequence complementary to, and is capable of hydrogen bonding to, the coding strand of another nucleic acid (e.g., an mRNA). Thus, in various embodiments, the RNAi agents of the present disclosure encompass any RNAi agents which target (e.g., are complementary, capable of hybridizing or hydrogen bonding to, etc.) any sequence presented, e.g., in any of Tables 1 to 6.

[0262] Once a functional guide strand has been identified, many variations to the guide and/or passenger strand can be made. For example, the RNAi agent may have modifications internally, or at one or both ends. The modifications at the ends can help stabilize the RNAi agent, protecting it from degradation by nucleases in the blood. The RNAi agents may optionally be directed to regions of the KRAS mRNA known or predicted to be near or at splice sites of the gene.

[0263] A RNAi agent can be constructed using chemical synthesis and enzymatic ligation reactions using procedures known in the art. For example, RNAi agent can be chemically synthesized using naturally-occurring nucleotides or variously modified nucleotides designed to decrease off-target effects, and/or increase the biological stability of the molecules or to increase the physical stability of the duplex formed between the antisense and sense nucleic acids, e.g., phosphorothioate derivatives and acridine substituted nucleotides can be used.

[0264] “G,” “C,” “A,” “T” and “U” each generally stand for a nucleotide that contains guanine, cytosine, adenine, thymidine and uracil as a base, respectively. However, the terms “ribonucleotide”, “deoxynucleotide”, or “nucleotide” can also refer to a modified nucleotide or a surrogate replacement moiety. The skilled person is well aware that guanine, cytosine, adenine, and uracil may be replaced by other moieties without substantially altering the base pairing properties of an oligonucleotide comprising a nucleotide bearing such replacement moiety. For example, without limitation, a nucleotide comprising inosine as its base may base pair with nucleotides containing adenine, cytosine, or uracil. Hence, nucleotides containing uracil, guanine, or adenine may be replaced in the nucleotide sequences of dsRNA featured in the present disclosure by a nucleotide containing, for example, inosine. In another example, adenine and cytosine anywhere in the oligonucleotide can be replaced with guanine and uracil, respectively to form Wobble base pairing with the target mRNA. Sequences containing such replacement moieties are suitable for the compositions and methods featured in the present disclosure.

[0265] The skilled artisan will recognize that the term “RNA molecule” or “ribonucleic acid molecule” encompasses not only RNA molecules as expressed or found in nature (i.e., are naturally occurring), but also non-naturally occurring analogs and derivatives of RNA comprising one or more ribonucleotide/ribonucleoside analogs or derivatives as described herein or as known in the art. The RNA can be modified in the nucleobase structure or in the ribose-phosphate backbone structure, e.g., as described herein below. However, the molecules comprising ribonucleoside analogs or derivatives must retain the ability to form a duplex. As non-limiting examples, an RNA molecule can also include at least one modified ribonucleoside, including but not limited to a 2′-O-methyl modified nucleotide, a nucleoside comprising a 5′ phosphorothioate group, a terminal nucleoside linked to a cholesteryl derivative or dodecanoic acid bisdecylamide group, a locked nucleoside, an abasic nucleoside, a 2′-deoxy-2′-fluoro modified nucleoside, a 2′-amino-modified nucleoside, 2′-alkyl-modified nucleoside, morpholino nucleoside, an unlocked ribonucleotide (e.g., an acyclic nucleotide monomer, as described in WO 2008/147824), a phosphoramidate or a non-natural base comprising nucleoside, or any combination thereof. Alternatively, an RNA molecule can comprise at least two modified ribonucleosides, at least 3, at least 4, at least 5, at least 6, at least 7, at least 8, at least 9, at least 10, at least 15, at least 20 or more, up to the entire length of the dsRNA molecule. The modifications need not be the same for each of such a plurality of modified ribonucleosides in an RNA molecule. In one embodiment, modified RNAs contemplated for use in methods and compositions described herein are peptide nucleic acids (PNAs) that have the ability to form the required duplex structure and that permit or mediate the specific degradation of a target RNA via a RISC pathway.

[0266] Examples of modified nucleotides which can be used to generate the RNAi agent include 5-fluorouracil, 5-bromouracil, 5-chlorouracil, 5-iodouracil, hypoxanthine, xantine, 4-acetylcytosine, 5-(carboxyhydroxylmethyl) uracil, 5-carboxymethylaminomethyl-2-thiouridine, 5-carboxymethylaminomethyluracil, dihydrouracil, beta-D-galactosylqueosine, inosine, N6-isopentenyladenine, 1-methylguanine, 1-methylinosine, 2,2-dimethylguanine, 2-methyladenine, 2-methylguanine, 3-methylcytosine, 5-methylcytosine, N6-adenine, 7-methylguanine, 5-methylaminomethyluracil, 5-methoxyaminomethyl-2-thiouracil, beta-D-mannosylqueosine, 5′-methoxycarboxymethyluracil, 5-methoxyuracil, 2-methylthio-N6-isopentenyladenine, uracil-5-oxyacetic acid (v), wybutoxosine, pseudouracil, queosine, 2-thiocytosine, 5-methyl-2-thiouracil, 2-thiouracil, 4-thiouracil, 5-methyluracil, uracil-5-oxyacetic acid methylester, uracil-5-oxyacetic acid (v), 5-methyl-2-thiouracil, 3-(3-amino-3-N-2-carboxypropyl) uracil, (acp3)w, and 2,6-diaminopurine.

[0267] A “modified variant” of a sequence disclosed herein includes any variant comprising the same sequence, but with a modification in the base, sugar, phosphate or backbone (but not a base substitution, e.g., A for G, or C for U). Thus, a modified variant can comprise any modified nucleotide described above (e.g., 5-fluorouracil, 5-bromouracil, 5-chlorouracil, 5-iodouracil, hypoxanthine, xantine, 4-acetylcytosine, 5-(carboxyhydroxylmethyl) uracil, etc.). When a base is replaced by a corresponding modified base (e.g., A for modified A), these modified nucleotides do not constitute a mismatch or base difference. Thus a given sequence with a U at a particular position and a modified variant comprising a 5-fluorouracil, 5-bromouracil, 5-chlorouracil, or 5-iodouracil at the same sequence would differ by 0 nt (or have no mismatches); however, a given sequence with a C at a particular position and a different sequence with a 5-fluorouracil (wherein the two sequences are otherwise identical) would differ by 1 nt (1 mismatch).

[0268] Replacing the 3′-terminal nucleotide overhanging segments of a 21-mer siRNA duplex having two-nucleotide 3′-overhangs with deoxyribonucleotides does not have an adverse effect on RNAi activity. Replacing up to four nucleotides on each end of the siRNA with deoxyribonucleotides has been well tolerated, whereas complete substitution with deoxyribonucleotides results in no RNAi activity. International PCT Publication No. WO 00/44914, and Beach et al. International PCT Publication No. WO 01/68836 preliminarily suggest that siRNA may include modifications to either the phosphate-sugar backbone or the nucleoside to include at least one of a nitrogen or sulfur heteroatom. Kreutzer et al. Canadian Patent Application No. 2,359,180, also describe certain chemical modifications for use in dsRNA constructs in order to counteract activation of double-stranded RNA-dependent protein kinase PKR, specifically 2′-amino or 2′-O-methyl nucleotides, and nucleotides containing a 2′-0 or 4′-C methylene bridge. Additional 3′-terminal nucleotide overhangs include dT (deoxythimidine), 2′-0,4′-C-ethylene thymidine (eT), and 2-hydroxyethyl phosphate (hp). 4-thiouracil and 5-bromouracil substitutions can also be made. Parrish et al. 2000 Molecular Cell 6: 1077-1087.

[0269] Those skilled in the art will appreciate that it is possible to synthesize and modify the siRNA as desired, using any conventional method known in the art (see Henschel et al. 2004 DEQOR: a web-based tool for the design and quality control of siRNAs. Nucleic Acids Research 32 (Web Server Issue): W113-W120). In addition, if the RNAi agent is a shRNA, it will be apparent to those skilled in the art that there are a variety of regulatory sequences (for example, constitutive or inducible promoters, tissue-specific promoters or functional fragments thereof, etc.) which are useful for shRNA expression construct/vector.

[0270] There are several examples in the art describing sugar, base, phosphate and backbone modifications that can be introduced into nucleic acid molecules with significant enhancement in their nuclease stability and efficacy. For example, oligonucleotides are modified to enhance stability and/or enhance biological activity by modification with nuclease resistant groups, for example, 2′-amino, 2′-C-allyl, 2′-flouro, 2′-O-methyl, 2′-O-allyl, 2′-H, nucleotide base modifications (for a review see Usman and Cedergren 1992 TIBS. 17: 34; Usman et al. 1994 Nucleic Acids Symp. Ser. 31: 163; Burgin et al. 1996 Biochemistry 35: 14090). Sugar modification of nucleic acid molecules are extensively described in the art.

[0271] In various embodiments, the RNAi agent comprises a 2′-modification selected from the group consisting of: 2′-deoxy, 2′-deoxy-2′-fluoro, 2′-O-methyl, 2′-O-methoxyethyl (2′-O-MOE), 2′-O-aminopropyl (2′-O-AP), 2′-O-dimethylaminoethyl (2′-O-DMAOE), 2′-O-dimethylaminopropyl (2′-O-DMAP), 2′-O-dimethylaminoethyloxyethyl (2′-O-DMAEOE), and 2′-O-N-methylacetamido (2′-O-NMA).

[0272] Additional modifications and conjugations of RNAi agents have been described. Soutschek et al. 2004 Nature 432: 173-178 presented conjugation of cholesterol to the 3′-end of the sense strand of a siRNA molecule by means of a pyrrolidine linker, thereby generating a covalent and irreversible conjugate. Chemical modifications (including conjugation with other molecules) of RNAi agents may also be made to improve the in vivo pharmacokinetic retention time and efficiency.

[0273] In various embodiments, the RNAi agent to KRAS comprises at least one 5′-uridine-adenine-3′ (5′-ua-3′) dinucleotide, wherein the uridine is a 2′-modified nucleotide; at least one 5′-uridine-guanine-3′ (5′-ug-3′) dinucleotide, wherein the 5′-uridine is a 2′-modified nucleotide; at least one 5′-cytidine-adenine-3′ (5′-ca-3′) dinucleotide, wherein the 5′-cytidine is a 2′-modified nucleotide; and/or at least one 5′-uridine-uridine-3′ (5′-uu-3′) dinucleotide, wherein the 5′-uridine is a 2′-modified nucleotide. In certain embodiments, the RNAi agent can comprise a non-natural nucleobase, wherein the non-natural nucleobase is difluorotolyl, nitroindolyl, nitropyrrolyl, or nitroimidazolyl. In a particular embodiment, the non-natural nucleobase is difluorotolyl. In certain embodiments, only one of the two oligonucleotide strands contains a non-natural nucleobase. In certain embodiments, both of the oligonucleotide strands contain a non-natural nucleobase.

[0274] In another embodiment, the RNAi comprises a gap or contains mismatch comprising an abasic nucleotide.

[0275] In another embodiment, the RNAi agent has a single-stranded nick (e.g., a break or missing bond in the backbone). In various embodiments, a single-stranded nick can be in either the sense or anti-sense strand, or both.

[0276] This nick can be, for example, in the sense strand, producing a small internally segmented interfering RNA, or sisiRNA, which may have less off-target effects than the corresponding RNAi agent without a nick. See, for example, WO 2007/107162 to Wengels and Kjems.

[0277] The antisense nucleic acid or RNAi agent can also have an alternative backbone such as locked nucleic acids (LNA), Morpholinos, peptidic nucleic acids (PNA), threose nucleic acid (TNA), or glycol nucleic acid (GNA), or FANA and/or it can be labeled (e.g., radiolabeled or otherwise tagged). FANA are described in Dowler et al. 2006 Nucl. Acids Res. 34: 1669-1675.

[0278] One or both strands can comprise an alternative backbone.

[0279] In yet another embodiment, the RNAi agent employed by the methods of the present disclosure can include an α-anomeric nucleic acid molecule. An α-anomeric nucleic acid molecule forms specific double-stranded hybrids with complementary RNA in which, contrary to the usual β-units, the strands run parallel to each other. Gaultier et al. 1987 Nucleic Acids. Res. 15: 6625-6641.

[0280] The antisense nucleic acid molecule can also comprise a 2′-o-methylribonucleotide (Inoue et al. 1987 Nucleic Acids Res. 15: 6131-6148) or a chimeric RNA-DNA analogue (Inoue et al. 1987 FEBS Lett. 215: 327-330).

[0281] Other modifications and/or other changes can be made to the RNAi agent. A portion of the RNAi agent can be double-stranded DNA, while another portion is double-stranded RNA, forming a DNA-RNA chimera (See, for example, Yamato et al. 2011. Cancer Gene Ther. 18: 587-597). Mismatches between the guide and passenger stand can also be introduced, though some positions may be better suited than others (See, for example, U.S. Patent App. No. 2009/0209626 to Khvorova). The passenger strand can also be shortened, to as short as 15 or 16 nt, while the guide strand remains 19 nt or longer (See, for example, Sun et al. 2008 Nature Biotech. 26: 1379-1382; and Chu and Rana 2008 RNA 14: 1714-1719). This can increase incorporation of the guide strand into the RNA-induced Silence Complex (RISC), and decrease incorporation of the passenger strand, than reducing off-target effects. In some cases, the passenger strand may be more amenable to modification (e.g., single-stranded nicking, nucleotide modifications, and shortening) than the guide strand.

[0282] These and many other modifications can be made once a functional guide strand is identified.

[0283] Pharmaceutical Compositions of RNAi Agents

[0284] As used here, a “pharmaceutical composition” comprises a pharmaceutically effective amount of one or more KRAS RNAi agent, a pharmaceutically acceptable carrier, and, optionally, an additional disease treatment which works synergistically with the RNAi agent. As used herein, “pharmacologically effective amount,” “therapeutically effective amount” or simply “effective amount” refers to that amount of a RNAi agent effective to produce the intended pharmacological, therapeutic or preventive result. For example, if a given clinical treatment is considered effective where there is at least a 10% reduction in a measurable parameter associated with a disease or disorder, a therapeutically effective amount of a drug for the treatment of that disease or disorder is the amount necessary to effect at least a 10% reduction in that parameter. In this embodiment, a therapeutically effective amount of a RNAi agent targeting KRAS can reduce KRAS protein levels by at least 10%. In additional embodiments, a given clinical treatment is considered effective where there is at least a 15, 20, 25, 30, 35, 40, 45, 50, 55, 60, 65, 70, 75, 80, 85, 90 or 95% reduction in a measurable parameter associated with a disease or disorder, and the therapeutically effective amount of a drug for the treatment of that disease or disorder is the amount necessary to effect at least a 15, 20, 25, 30, 35, 40, 45, 50, 55, 60, 65, 70, 75, 80, 85, 90 or 95% reduction, respectively, in that parameter.

[0285] The term “pharmaceutically acceptable carrier” refers to a carrier for administration of a therapeutic agent. Such carriers include, but are not limited to, lipid nanoparticles, saline, buffered saline, dextrose, water, glycerol, ethanol, and combinations thereof. The term specifically excludes cell culture medium. Any appropriate phamaceutical carrier known in the art can be used in conjunction with the RNAi agents disclosed herein.

[0286] Pharmaceutical Composition Comprising a RNAi Agent to KRAS

[0287] Additional components of a pharmaceutical composition comprising a RNAi Agent to KRAS are contemplated to aid in delivery, stability, efficacy, or reduction of immunogenicity.

[0288] Liposomes have been used previously for drug delivery (e.g., delivery of a chemotherapeutic). Liposomes (e.g., cationic liposomes) are described in PCT publications W002/100435A1, W003/015757A1, W004029213A2; and WO/2011/076807; U.S. Pat. Nos. 5,962,016; 5,030,453; and 6,680,068; and U.S. Patent Application 2004/0208921. A process of making liposomes is also described in W004/002453A1. Furthermore, neutral lipids have been incorporated into cationic liposomes (e.g., Farhood et al. 1995), as well as PEGylated lipids.

[0289] Cationic liposomes have been used to deliver RNAi agent to various cell types (Sioud and Sorensen 2003; U.S. Patent Application 2004/0204377; Duxbury et al., 2004; Donze and Picard, 2002).

[0290] Use of neutral liposomes disclosed in Miller et al. 1998, and U.S. Patent Application 2003/0012812.

[0291] As used herein, the term “SNALP” refers to a stable nucleic acid-lipid particle. A SNALP represents a vesicle of lipids coating a reduced aqueous interior comprising a nucleic acid such as an iRNA or a plasmid from which an iRNA is transcribed. SNALPs are described, e.g., in U.S. Patent Application Publication Nos. 20060240093, 20070135372, and in International Application No. WO 2009082817.

[0292] Chemical transfection using lipid-based, amine-based and polymer-based techniques, is disclosed in products from Ambion Inc., Austin, Tex.; and Novagen, EMD Biosciences, Inc, an Affiliate of Merck KGaA, Darmstadt, Germany); Ovcharenko D (2003) “Efficient delivery of siRNAs to human primary cells.” Ambion TechNotes 10 (5): 15-16). Additionally, Song et al. (Nat Med. published online (Feb. 10, 2003) doi: 10.1038/nm828) and others [Caplen et al. 2001 Proc. Natl. Acad. Sci. (USA), 98: 9742-9747; and McCaffrey et al. Nature 414: 34-39] disclose that liver cells can be efficiently transfected by injection of the siRNA into a mammal's circulatory system.

[0293] A variety of molecules have been used for cell-specific RNAi agent delivery. See, for example, WO/2011/076807. For example, the nucleic acid-condensing property of protamine has been combined with specific antibodies to deliver siRNAs. Song et al. 2005 Nat Biotech. 23: 709-717. The self-assembly PEGylated polycation polyethylenimine (PEI) has also been used to condense and protect siRNAs. Schiffelers et al. 2004 Nucl. Acids Res. 32: e149, 141-110.

[0294] The RNAi agents of the present disclosure can be delivered via, for example, Lipid nanoparticles (LNP); neutral liposomes (NL); polymer nanoparticles; double-stranded RNA binding motifs (dsRBMs); or via modification of the RNAi agent (e.g., covalent attachment to the dsRNA) or by any method known in the art for delivery of a RNAi agent comprising nucleic acids.

[0295] Lipid nanoparticles (LNP) are self-assembling cationic lipid based systems. These can comprise, for example, a neutral lipid (the liposome base); a cationic lipid (for siRNA loading); cholesterol (for stabilizing the liposomes); and PEG-lipid (for stabilizing the formulation, charge shielding and extended circulation in the bloodstream).

[0296] The cationic lipid can comprise, for example, a headgroup, a linker, a tail and a cholesterol tail. The LNP can have, for example, good tumor delivery, extended circulation in the blood, small particles (e.g., less than 100 nm), and stability in the tumor microenvironment (which has low pH and is hypoxic).

[0297] Neutral Liposomes (NL) are Non-Cationic Lipid Based Particles.

[0298] Polymer nanoparticles are self-assembling polymer-based particles.

[0299] Double-stranded RNA binding motifs (dsRBMs) are self-assembling RNA binding proteins, which will need modifications.

[0300] In various embodiments, the RNAi agent to KRAS is packaged as a monotherapy into a delivery vehicle, or may be further ligated to one or more diagnostic compound, reporter group, cross-linking agent, nuclease-resistance conferring moiety, natural or unusual nucleobase, lipophilic molecule, cholesterol, lipid, lectin, steroid, uvaol, hecigenin, diosgenin, terpene, triterpene, sarsasapogenin, Friedelin, epifriedelanol-derivatized lithocholic acid, vitamin, carbohydrate, dextran, pullulan, chitin, chitosan, synthetic carbohydrate, oligo lactate 15-mer, natural polymer, low- or medium-molecular weight polymer, inulin, cyclodextrin, hyaluronic acid, protein, protein-binding agent, integrin-targeting molecule, polycationic, peptide, polyamine, peptide mimic, and/or transferrin.

[0301] The RNAi agents of the present disclosure can be prepared in a pharmaceutical composition comprising various components appropriate for the particular method of administration of the RNAi agent.

[0302] KRAS-Related Diseases

[0303] The present disclosure encompasses RNAi agents to KRAS and administration of the RNAi agents to humans and non-human animals to treat various KRAS-related diseases.

[0304] By “KRAS-related disease” is meant any disease related to a dysfunction in the level, expression and/or activity of KRAS, and/or any disease which can be treated and/or ameliorated by modulating the level, expression and/or activity of KRAS. In particular, it includes a proliferative disease, including without limitation a solid or liquid cancer, e.g., adenocarcinoma, colorectal cancer, advanced and/or metastatic colorectal cancer, colon cancer, lung, non-small cell lung cancer and lung adenocarcinoma, acute myelogenous lung, bladder, brain, breast, cervical, endometrial, gastric, head and neck, kidney, leukemia, myelodysplastic syndrome, myeloid leukemia, liver, melanoma, ovarian, pancreatic, prostate, testicular, thyroid cancers, and cardio-facio-cutaneous (CFC) syndrome and Noonan syndrome, and similar and related diseases.

[0305] For additional information on KRAS-related diseases, see, for example: Bos. 1989. Cancer Res. 49. 17: 4682-9; Engelman et al. 2008. Nature Med. 14: 1351-1356; Haigis et al. 2008 Nature Gen. 40: 600-608; Karapetis et al. 2008 N. E. J. Med. 359: 1757-1765; Kiaris et al. 1995. Int. J. Oncol. 7: 413-421; Liu et al. 1987 Nature 330: 186-188; Riely et al. 2008 Clin. Cancer Res. 14: 5731; and Riely et al. 2009. Proc. Am. Thorac. Soc. 6: 201-205. KRAS mutation, hyperactivity or over-expression is also associated with cardio-facio-cutaneous (CFC) syndrome and Noonan syndrome. Adachi et al. 2012 Seizure: Eur. J. Epilepsy 21: 55-60; Kim et al. 2011. J. Korean Soc. Neonatol. 18: 374-378.

[0306] RNAi agents to KRAS can thus be used to treat KRAS-related diseases, particularly those diseases associated with altered expression, activity and/or levels of KRAS.

[0307] Use of RNAi Agents for Treatment of KRAS-Related Diseases

[0308] The RNAi agents to KRAS described herein can be formulated into pharmaceutical compositions which can be administered to humans or non-human animals. These compositions can comprise one or more RNAi agents, and, optionally, additional treatments useful for treating KRAS-related diseases. They can be administered as part of an early/preventative treatment, and can be administered in a therapeutically-effective dosage. The pharmaceutical composition can comprise a pharmaceutical carrier and can be administered by any method known in the art. These various aspects of the present disclosure are described in additional detail below.

[0309] RNAi agents to KRAS can be administered to humans and non-human animals for treatment of KRAS-related diseases.

[0310] In one embodiment of the present disclosure, the compositions comprising a KRAS RNAi agent can be administered to non-human animals. For example, the compositions can be given to chickens, turkeys, livestock animals (such as sheep, pigs, horses, cattle, etc.), companion animals (e.g., cats and dogs) and can have efficacy in treatment of proliferative disease, cardio-facio-cutaneous (CFC) syndrome or Noonan syndrome, and similar diseases. In each case, the RNAi agent to KRAS would be selected to match the sequence of the KRAS of the genome of the animal, and to, particularly, contain at least 1 nt mismatch from all other genes in that animal's genome. The RNAi agents of the present disclosure can thus be used in treatment of KRAS-related diseases in humans and non-human animals.

[0311] As used herein in the context of KRAS expression, the terms “treat,” “treatment,” and the like, refer to relief from or alleviation of pathological processes mediated by KRAS expression. In the context of the present disclosure insofar as it relates to any of the other conditions recited herein below (other than pathological processes mediated by KRAS expression), the terms “treat,” “treatment,” and the like mean to relieve or alleviate at least one symptom associated with such condition, or to slow or reverse the progression or anticipated progression of such condition, such as slowing the progression of a lipid disorder, such as atherosclerosis.

[0312] By “treatment” is also meant prophylaxis, therapy, cure, or any other change in a patient's condition indicating improvement or absence of degradation of physical condition. By “treatment” is meant treatment of KRAS-related disease (e.g., a proliferative disease, including without limitation a solid or liquid cancer, adenocarcinoma, colorectal cancer, advanced and/or metastatic colorectal cancer, colon cancer, lung, non-small cell lung cancer and lung adenocarcinoma, acute myelogenous lung, bladder, brain, breast, cervical, endometrial, gastric, head and neck, kidney, leukemia, myelodysplastic syndrome, myeloid leukemia, liver, melanoma, ovarian, pancreatic, prostate, testicular, thyroid cancers, or cardio-facio-cutaneous (CFC) syndrome or Noonan syndrome), or any appropriate treatment of any other ailment the patient has. As used herein, the terms “treatment” and “treat” refer to both prophylactic and preventative treatment and curative or disease-modifying treatment, including treatment of patients at risk of contracting a disease or suspected of having a disease, as well as patients already ill or diagnosed as suffering from a condition. The terms “treatment” and “treat” also refer to the maintenance and/or promotion of health in an individual not suffering from a disease but who may be susceptible to developing an unhealthy condition, such as nitrogen imbalance or muscle loss. In one embodiment, “treatment” does not encompass prevention of a disease state. Thus, the present disclosure is useful for suppressing expression of KRAS and/or treating a KRAS-related disease in an individual afflicted by a KRAS-related disease, or an individual susceptible to a KRAS-related disease. An individual “afflicted” by a KRAS-related disease has demonstrated detectable symptoms characteristics of the disease, or had otherwise been shown clinically to have been exposed to or to carry KRAS-related disease pathogens or markers. As non-limiting examples, an individual afflicted by a KRAS-related disease can show outward symptoms; or can show no outward symptoms but can be shown with a clinical test to carry protein markers associated with a KRAS-related disease, or proteins or genetic material associated with a pathogen in the blood.

[0313] Early treatment of some KRAS-related diseases may be more efficacious if administered early rather than later. Thus, in one particular embodiment, the RNAi agent to KRAS is administered early, prior to disease manifestation, and/or as a preventative agent, rather than administered after disease establishment.

[0314] Treatments of KRAS-related diseases can comprise various treatments, comprising a KRAS RNAi agent, and optionally further comprising an additional treatment, which can be a method (or procedure), or an additional composition (e.g., an agent or additional RNAi agent).

[0315] Dosages and Effective Amounts of RNAi Agents

[0316] The RNAi agents of the present disclosure are administered in a dosage of a therapeutically effective amount to a patient in need thereof.

[0317] An “effective amount” or a “therapeutically effective amount” is an amount that treats a disease or medical condition of an individual, or, more generally, provides a nutritional, physiological or medical benefit to an individual. As used herein, the phrases “therapeutically effective amount” and “prophylactically effective amount” refer to an amount that provides a therapeutic benefit in the treatment, prevention, or management of pathological processes mediated by KRAS expression or an overt symptom of pathological processes mediated by KRAS expression. The specific amount that is therapeutically effective can be readily determined by an ordinary medical practitioner, and may vary depending on factors known in the art, such as, for example, the type of pathological processes mediated by KRAS expression, the patient's history and age, the stage of pathological processes mediated by KRAS expression, and the administration of other agents that inhibit pathological processes mediated by KRAS expression.

[0318] In various embodiments of the present disclosure, the patient is at least about 1, 3, 6, or 9 months, or 1, 5, 10, 20, 30, 40, 50, 55, 60, 65, 70, or 75 years of age. In various embodiments, the patient is no more than about 1, 3, 6, or 9 months, or 1, 5, 10, 20, 30, 40, 50, 55, 60, 65, 70, 75, 80, 90, or 100 years of age. In various embodiments the patient has a body weight of at least about 5, 10, 15, 20, 30, 40, 50, 60, 70, 80, 90, 100, 120, 140, 160, 180, 200, 220, 240, 260, 280, 300, 320, 340, 360, 380 or 400 lbs. In various embodiments, the patient has a body weight of no more than about 5, 10, 15, 20, 30, 40, 50, 60, 70, 80, 90, 100, 120, 140, 160, 180, 200, 220, 240, 260, 280, 300, 320, 340, 360, 380 or 400 lbs.

[0319] In various embodiments of the present disclosure, the dosage [measuring only the active ingredient(s)] can be at least about 1, 5, 10, 25, 50, 100, 200, 250, 300, 250, 400, 450, 500, 550, 600, 650, 700, 750, 800, 850, 900, 950 or 1000 ng, 1, 5, 10, 25, 50, 100, 200, 250, 300, 250, 400, 450, 500, 550, 600, 650, 700, 750, 800, 850, 900, 950 or 1000 micrograms, 1, 5, 10, 25, 50, 100, 200, 250, 300, 250, 400, 450, 500, 550, 600, 650, 700, 750, 800, 850, 900, 950 or 1000 mg. In various embodiments, the dosage can be no more than about 10, 25, 50, 100, 200, 250, 300, 250, 400, 450, 500, 550, 600, 650, 700, 750, 800, 850, 900, 950 or 1000 mg. In various embodiments, the dosage can be administered at least more than once a day, daily, more than once a weekly, weekly, bi-weekly, monthly, and/or every 2, 3, 4, 5, 6, 7, 8, 9, 10, 11 or 12 months, or a combination thereof.

[0320] In various embodiments, the dosage is correlated to the body weight or body surface area of the individual. The actual dosage level can be varied to obtain an amount of active agent which is effective for a particular patient, composition and mode of administration, without being toxic to the patient. The selected dose will depend on a variety of pharmacokinetic factors, including the activity of the particular RNAi agent employed, the route of administration, the rate of excretion of the RNAi agent, the duration of the treatment, other drugs, compounds and/or materials used in combination with the RNAi agent, the age, sex, weight, condition, general health and prior medical history of the patient, and like factors well known in the medical arts. A physician or veterinarian having ordinary skill in the art can readily determine the effective amount of the RNAi agent required. A suitable dose will be that amount which is the lowest dose effective to produce a therapeutic effect, or a dose low enough to produce a therapeutic effect without causing side effects.

[0321] RNAi Agents to KRAS in Combination with Other Therapies

[0322] In addition to a therapeutically-effective dosage of one or more RNAi agents to KRAS, the pharmaceutical compositions of the present disclosure can comprise or be used in conjunction with an additional disease treatment which works synergistically with the RNAi agent.

[0323] In addition, many tumors contain mutations in both KRAS and one or more other genes. For example, some lung cancer or colorectal tumor cells or other types of cancer can have mutations in both KRAS and one or more of: EGFR, GLUT1, P13K, RAF, and APC. Haigis et al. 2008 Nature Gen. 40: 600-608; Karapetis et al. 2008 N. E. J. Med. 359: 1757-1765; and Yun et al. 2009 Science 325: 1555-1559. Effective combination therapy can comprise a KRAS RNAi agent combined with an agent which targets the other mutated hyper-active or overexpressed protein, or which is an approved therapy for the cancer type being treated.

[0324] RNAi agents to KRAS can thus be effective when used in a regimen involving other disease treatments. Some of these treatments are not effective when the patient has an activating mutation in KRAS. However, the RNAi agent to KRAS can reduce the overall amount of KRAS, improving the efficacy of disease treatments which are not effective in the presence of an activating KRAS mutation.

[0325] Furthermore, proliferation, survival and/or apoptosis resistance of KRAS-defective tumor cells may require another factor such as NF-kappa-B or I-kappa-B kinase TBK1. Meylan et al. 2009 Nature 462: 104-107; and Barbie et al. 2009 Nature 462: 108-112. Thus, in some embodiments, effective combination therapy can comprise administration of a KRAS RNAi agent and administration (or co-administration) of a treatment which targets the other factor (e.g., a siRNA, antibody or small molecule which targets NF-kappa-B or TBK1).

[0326] Thus, the KRAS RNAi agent can be used in a combination therapy along with any other therapeutic composition or method or therapy, including those which specifically target another factor, or which are otherwise known to be effective in treatment of a KRAS-related disease.

[0327] In the treatment of these KRAS-related diseases, the RNAi agent(s) and additional disease treatment(s) can be administered in any order, simultaneously or sequentially, or in multiple doses over time. Administration of the RNAi agent and the additional treatment can be, for example, simultaneous, concurrent, separate or sequential.

[0328] Simultaneous administration may, e.g., take place in the form of one fixed combination with two or more active ingredients, or by simultaneously administering two or more active ingredients that are formulated independently. Sequential use (administration) preferably means administration of one (or more) components of a combination at one time point, other components at a different time point, that is, in a chronically staggered manner, preferably such that the combination shows more efficiency than the single compounds administered independently (especially showing synergism). Separate use (administration) preferably means administration of the components of the combination independently of each other at different time points, preferably meaning that the components (a) and (b) are administered such that no overlap of significant measurable blood levels of both compounds are present in an overlapping manner (at the same time).

[0329] Also combinations of two or more of sequential, separate and simultaneous administration are possible, preferably such that the combination component-drugs show a joint therapeutic effect that exceeds the effect found when the combination component-drugs are used independently at time intervals so large that no mutual effect on their therapeutic efficiency can be found, a synergistic effect being especially preferred.

[0330] The term “delay of progression” as used herein means administration of the combination to patients being in a pre-stage or in an early phase, of the first manifestation or a relapse of the disease to be treated, in which patients, e.g., a pre-form of the corresponding disease is diagnosed or which patients are in a condition, e.g., during a medical treatment or a condition resulting from an accident, under which it is likely that a corresponding disease will develop.

[0331] “Jointly therapeutically active” or “joint therapeutic effect” means that the compounds may be given separately (in a chronically staggered manner, especially a sequence-specific manner) in such time intervals that they preferably, in the warm-blooded animal, especially human, to be treated, still show a (preferably synergistic) interaction (joint therapeutic effect). Whether this is the case, can inter alia be determined by following the blood levels, showing that both compounds are present in the blood of the human to be treated at least during certain time intervals.

[0332] The present disclosure thus encompasses a combination therapy comprising both a KRAS RNAi agent and one or more additional therapies for KRAS-related diseases known in the art.

[0333] The use of known treatments for any of KRAS-related diseases is within the capabilities of one of ordinary skill in the art. Any such additional treatment can be used in conjunction with a RNAi agent to KRAS.

[0334] The dosages of the additional treatments and RNAi agents can be easily determined by one of ordinary skill in the art, and as described herein.

[0335] Embodiments Comprising One or More Efficacious RNAi Agents to KRAS

[0336] In various embodiments of the present disclosure, the present disclosure comprises a RNAi agent demonstrating at least about 40, 50, 60, 70, 80, 90 or 95% knockdown (KD) (i.e., no more than about 60, 50, 40, 30, 20, 10, or 5% residual gene activity, respectively) of the KRAS gene at an in vitro concentration of 10 or 0.1 nM as assayed in RKO cells.

[0337] In various embodiments of the present disclosure, the composition comprises one or more RNAi agents capable of a Fold-Change at 10 nM at 24 hr of <0.05, <0.10, <0.20, <0.30, <0.40 (indicating a KRAS gene knock-down of at least 95, 90, 80, 70, or 60%, respectively, at a concentration of 10 nM at 24 hrs in RKO cells). RNAi agents capable of these levels of activity are disclosed in the Tables herein.

[0338] Embodiments Comprising One or More Efficacious RNAi Agents to KRAS

[0339] In various embodiments of the present disclosure, the composition comprises one or more RNAi agents capable of a Fold-Change at 0.1 nM at 120 hr of <0.30, <0.20, or <0.10 (indicating a KRAS gene knock-down of at least 70, 80, or 90%, respectively, at a concentration of 0.1 nM at 120 hrs in RKO cells). RNAi agents capable of these levels of activity are disclosed in the Tables herein.

[0340] Various Embodiments Comprising One or More RNAi Agents to KRAS with Low EC50

[0341] In various embodiments of the present disclosure, the composition comprises one or more RNAi agents capable of mediating a 50% gene knockdown (EC50) of KRAS at a low concentration in RKO cells. For many of the RNAi agents listed herein, an estimated EC50 is calculated. Cells are treated at 10 nM, 1 nM, 0.1 nM, 0.01 nM, and 0.001 nM of RNAi agent, and the data fit to a curve. The indicated EC50 is an estimated EC50 calculated from available data that is expected to give 50% gene knock-down of KRAS in RKO cells. In various embodiments of the present disclosure, the composition comprises one or more RNAi agents capable of mediating a 50% gene knockdown (EC50) at 100, 75, 50, 25, 10, 5, 2.5, 1, 0.75, 0.5, 0.25, 0.2, 0.12, 0.1, 0.09, 0.08, 0.07, 0.06, 0.05, 0.04, 0.03, or 0.02 nM or less in RKO cells. RNAi agents capable of these levels of activity are disclosed in the Tables herein.

[0342] Specific Embodiments of RNAi Agents to KRAS

[0343] In one embodiment, the present disclosure pertains to: a composition comprising any one or more of: a RNAi agent comprising a sense strand and an anti-sense strand, wherein the anti-sense strand comprises at least 15 contiguous nucleotides differing by 0, 1, 2, or 3 nucleotides from the anti-sense strand of: any RNAi agent from any of Tables 1 to 6 and modified or unmodified variants thereof.

[0344] In one embodiment, the composition comprises any one or more of: a RNAi agent comprising a sense strand and an anti-sense strand, wherein the anti-sense strand comprises at least 15 contiguous nucleotides differing by 0 nucleotides from the anti-sense strand of any RNAi agent from any of Tables 1 to 6, and modified and unmodified variants thereof.

[0345] In one embodiment, the present disclosure pertains to a composition comprising any one or more of: any RNAi agent from any of Tables 1 to 6, and modified and unmodified variants thereof.

[0346] In one embodiment, the present disclosure pertains to a composition comprising any one or more of: a RNAi agent comprising an anti-sense strand comprising the sequence of the anti-sense strand of any RNAi agent from any of Tables 1 to 6, and modified and unmodified variants thereof.

[0347] In one embodiment, the present disclosure pertains to a composition comprising any one or more of: a RNAi agent comprises an anti-sense strand consisting of the sequence of the anti-sense strand of any RNAi agent from any of Tables 1 to 6, and modified and unmodified variants thereof.

[0348] In one embodiment, the present disclosure pertains to a composition comprising any one or more of: a RNAi agent comprising a first strand and a second strand, wherein the sequence of the first strand is the second of the first strand of any RNAi agent from any of Tables 1 to 6, and modified and unmodified variants thereof.

[0349] In one embodiment, the present disclosure pertains to a composition comprising any one or more of: a RNAi agent comprising a first and a second strand, wherein the sequences of the first and the second strand are the sequences of the first and second strand of any RNAi agent from any of Tables 1 to 6, and modified and unmodified variants thereof.

[0350] In one embodiment, the present disclosure pertains to a composition comprising any one or more of: a RNAi agent comprising a first strand and a second strand, wherein the sequence of the first strand is the second of the first strand of any RNAi agent from any of Tables 1 to 6, and modified and unmodified variants thereof, wherein the first and/or second strand further comprise up to about 20 additional nucleotides.

[0351] Specific embodiments of RNAi agents to KRAS

[0352] In one embodiment, the present disclosure pertains to: a composition comprising any one or more of: a RNAi agent comprising a first strand and a second strand, wherein the first strand comprises at least 15 contiguous nucleotides differing by 0, 1, 2, or 3 nucleotides from the first strand of: any RNAi agent from any of Tables 1 to 6 or modified or unmodified variants thereof.

[0353] In one embodiment, the present disclosure pertains to: a composition comprising any one or more of: a RNAi agent comprising a first strand and a second strand, wherein the first strand comprises at least 15 contiguous nucleotides from the first strand of any RNAi agent from any of Tables 1 to 6, or modified and unmodified variants thereof.

[0354] In one embodiment, the present disclosure pertains to a composition comprising any one or more of: a RNAi agent comprising a first strand and a second strand, wherein the sequence of the first strand is the sequence of a first strand of any RNAi agent from any of Tables 1 to 6, or modified and unmodified variants thereof.

[0355] In one embodiment, the present disclosure pertains to a composition comprising any one or more of: a RNAi agent comprising a first and a second strand, wherein the sequences of the first and/or second strands comprise the sequences of a first and/or second strands of any RNAi agent from any of Tables 1 to 6, or modified and unmodified variants thereof.

[0356] In one embodiment, the present disclosure pertains to a composition comprising any one or more of: a RNAi agent comprising a first and a second strand, wherein the sequences of the first and the second strand are the sequences of the first and second strand of any RNAi agent from any of Tables 1 to 6, or modified and unmodified variants thereof.

[0357] In one embodiment, the present disclosure pertains to a composition comprising any one or more of: a RNAi agent comprising a first and a second strand, wherein the sequence of the first and/or second strand is the sequence of a first and/or second strand of any RNAi agent from any of Tables 1 to 6, or modified and unmodified variants thereof, wherein the first and/or second strand further comprise up to about 20 additional nucleotides.

[0358] Specific embodiments comprising at least 15 contiguous nucleotides differing from 0 to 3 nt from RNAi agents disclosed herein

[0359] In one embodiment, the present disclosure pertains to: a composition comprising any one or more of: a RNAi agent comprising a first and a second strand, wherein the first strand comprises at least 15 contiguous nucleotides (nt) differing by 0, 1, 2, or 3 nt from a first strand of: any RNAi agent from any of Tables 1 to 6 or modified or unmodified variants thereof.

[0360] Thus, in various embodiments, the present disclosure pertains to a composition comprising any one or more of the following:

[0361] A RNAi agent comprising a first and a second strand, wherein the first strand comprises at least 15 contiguous nt differing by 0, 1, 2, or 3 nt from a first strand of: AD-35523.3 (SEQ ID NO: 428), or a modified or unmodified variant thereof.

[0362] A RNAi agent comprising a first and a second strand, wherein the first strand comprises at least 15 contiguous nt differing by 0, 1, 2, or 3 nt from a first strand of: AD-35529.1 (SEQ ID NO: 429), or a modified or unmodified variant thereof.

[0363] A RNAi agent comprising a first and a second strand, wherein the first strand comprises at least 15 contiguous nt differing by 0, 1, 2, or 3 nt from a first strand of: AD-35535.4 (SEQ ID NO: 430), or a modified or unmodified variant thereof.

[0364] A RNAi agent comprising a first and a second strand, wherein the first strand comprises at least 15 contiguous nt differing by 0, 1, 2, or 3 nt from a first strand of: AD-35541.4 (SEQ ID NO: 431), or a modified or unmodified variant thereof.

[0365] A RNAi agent comprising a first and a second strand, wherein the first strand comprises at least 15 contiguous nt differing by 0, 1, 2, or 3 nt from a first strand of: AD-35547.4 (SEQ ID NO: 432), or a modified or unmodified variant thereof.

[0366] A RNAi agent comprising a first and a second strand, wherein the first strand comprises at least 15 contiguous nt differing by 0, 1, 2, or 3 nt from a first strand of: AD-35553.4 (SEQ ID NO: 433), or a modified or unmodified variant thereof.

[0367] A RNAi agent comprising a first and a second strand, wherein the first strand comprises at least 15 contiguous nt differing by 0, 1, 2, or 3 nt from a first strand of: AD-35559.4 (SEQ ID NO: 434), or a modified or unmodified variant thereof.

[0368] A RNAi agent comprising a first and a second strand, wherein the first strand comprises at least 15 contiguous nt differing by 0, 1, 2, or 3 nt from a first strand of: AD-35565.4 (SEQ ID NO: 435), or a modified or unmodified variant thereof.

[0369] A RNAi agent comprising a first and a second strand, wherein the first strand comprises at least 15 contiguous nt differing by 0, 1, 2, or 3 nt from a first strand of: AD-35524.4 (SEQ ID NO: 436), or a modified or unmodified variant thereof.

[0370] A RNAi agent comprising a first and a second strand, wherein the first strand comprises at least 15 contiguous nt differing by 0, 1, 2, or 3 nt from a first strand of: AD-35530.4 (SEQ ID NO: 437), or a modified or unmodified variant thereof.

[0371] A RNAi agent comprising a first and a second strand, wherein the first strand comprises at least 15 contiguous nt differing by 0, 1, 2, or 3 nt from a first strand of: AD-35536.4 (SEQ ID NO: 438), or a modified or unmodified variant thereof.

[0372] A RNAi agent comprising a first and a second strand, wherein the first strand comprises at least 15 contiguous nt differing by 0, 1, 2, or 3 nt from a first strand of: AD-35542.4 (SEQ ID NO: 439), or a modified or unmodified variant thereof.

[0373] A RNAi agent comprising a first and a second strand, wherein the first strand comprises at least 15 contiguous nt differing by 0, 1, 2, or 3 nt from a first strand of: AD-35548.4 (SEQ ID NO: 440), or a modified or unmodified variant thereof.

[0374] A RNAi agent comprising a first and a second strand, wherein the first strand comprises at least 15 contiguous nt differing by 0, 1, 2, or 3 nt from a first strand of: AD-35554.4 (SEQ ID NO: 441), or a modified or unmodified variant thereof.

[0375] A RNAi agent comprising a first and a second strand, wherein the first strand comprises at least 15 contiguous nt differing by 0, 1, 2, or 3 nt from a first strand of: AD-35560.2 (SEQ ID NO: 442), or a modified or unmodified variant thereof.

[0376] A RNAi agent comprising a first and a second strand, wherein the first strand comprises at least 15 contiguous nt differing by 0, 1, 2, or 3 nt from a first strand of: AD-35566.4 (SEQ ID NO: 443), or a modified or unmodified variant thereof.

[0377] A RNAi agent comprising a first and a second strand, wherein the first strand comprises at least 15 contiguous nt differing by 0, 1, 2, or 3 nt from a first strand of: AD-35525.2 (SEQ ID NO: 444), or a modified or unmodified variant thereof.

[0378] A RNAi agent comprising a first and a second strand, wherein the first strand comprises at least 15 contiguous nt differing by 0, 1, 2, or 3 nt from a first strand of: AD-35531.4 (SEQ ID NO: 445), or a modified or unmodified variant thereof.

[0379] A RNAi agent comprising a first and a second strand, wherein the first strand comprises at least 15 contiguous nt differing by 0, 1, 2, or 3 nt from a first strand of: AD-35537.4 (SEQ ID NO: 446), or a modified or unmodified variant thereof.

[0380] A RNAi agent comprising a first and a second strand, wherein the first strand comprises at least 15 contiguous nt differing by 0, 1, 2, or 3 nt from a first strand of: AD-35543.2 (SEQ ID NO: 447), or a modified or unmodified variant thereof.

[0381] A RNAi agent comprising a first and a second strand, wherein the first strand comprises at least 15 contiguous nt differing by 0, 1, 2, or 3 nt from a first strand of: AD-35549.4 (SEQ ID NO: 448), or a modified or unmodified variant thereof.

[0382] A RNAi agent comprising a first and a second strand, wherein the first strand comprises at least 15 contiguous nt differing by 0, 1, 2, or 3 nt from a first strand of: AD-35555.4 (SEQ ID NO: 449), or a modified or unmodified variant thereof.

[0383] A RNAi agent comprising a first and a second strand, wherein the first strand comprises at least 15 contiguous nt differing by 0, 1, 2, or 3 nt from a first strand of: AD-35561.4 (SEQ ID NO: 450), or a modified or unmodified variant thereof.

[0384] A RNAi agent comprising a first and a second strand, wherein the first strand comprises at least 15 contiguous nt differing by 0, 1, 2, or 3 nt from a first strand of: AD-35567.4 (SEQ ID NO: 451), or a modified or unmodified variant thereof.

[0385] A RNAi agent comprising a first and a second strand, wherein the first strand comprises at least 15 contiguous nt differing by 0, 1, 2, or 3 nt from a first strand of: AD-35526.4 (SEQ ID NO: 452), or a modified or unmodified variant thereof.

[0386] A RNAi agent comprising a first and a second strand, wherein the first strand comprises at least 15 contiguous nt differing by 0, 1, 2, or 3 nt from a first strand of: AD-35532.4 (SEQ ID NO: 453), or a modified or unmodified variant thereof.

[0387] A RNAi agent comprising a first and a second strand, wherein the first strand comprises at least 15 contiguous nt differing by 0, 1, 2, or 3 nt from a first strand of: AD-35538.4 (SEQ ID NO: 454), or a modified or unmodified variant thereof.

[0388] A RNAi agent comprising a first and a second strand, wherein the first strand comprises at least 15 contiguous nt differing by 0, 1, 2, or 3 nt from a first strand of: AD-35544.4 (SEQ ID NO: 455), or a modified or unmodified variant thereof.

[0389] A RNAi agent comprising a first and a second strand, wherein the first strand comprises at least 15 contiguous nt differing by 0, 1, 2, or 3 nt from a first strand of: AD-35550.4 (SEQ ID NO: 456), or a modified or unmodified variant thereof.

[0390] A RNAi agent comprising a first and a second strand, wherein the first strand comprises at least 15 contiguous nt differing by 0, 1, 2, or 3 nt from a first strand of: AD-35556.4 (SEQ ID NO: 457), or a modified or unmodified variant thereof.

[0391] A RNAi agent comprising a first and a second strand, wherein the first strand comprises at least 15 contiguous nt differing by 0, 1, 2, or 3 nt from a first strand of: AD-35562.4 (SEQ ID NO: 458), or a modified or unmodified variant thereof.

[0392] A RNAi agent comprising a first and a second strand, wherein the first strand comprises at least 15 contiguous nt differing by 0, 1, 2, or 3 nt from a first strand of: AD-35568.4 (SEQ ID NO: 459), or a modified or unmodified variant thereof.

[0393] A RNAi agent comprising a first and a second strand, wherein the first strand comprises at least 15 contiguous nt differing by 0, 1, 2, or 3 nt from a first strand of: AD-35527.4 (SEQ ID NO: 460), or a modified or unmodified variant thereof.

[0394] A RNAi agent comprising a first and a second strand, wherein the first strand comprises at least 15 contiguous nt differing by 0, 1, 2, or 3 nt from a first strand of: AD-35533.4 (SEQ ID NO: 461), or a modified or unmodified variant thereof.

[0395] A RNAi agent comprising a first and a second strand, wherein the first strand comprises at least 15 contiguous nt differing by 0, 1, 2, or 3 nt from a first strand of: AD-35539.4 (SEQ ID NO: 462), or a modified or unmodified variant thereof.

[0396] A RNAi agent comprising a first and a second strand, wherein the first strand comprises at least 15 contiguous nt differing by 0, 1, 2, or 3 nt from a first strand of: AD-35545.4 (SEQ ID NO: 463), or a modified or unmodified variant thereof.

[0397] A RNAi agent comprising a first and a second strand, wherein the first strand comprises at least 15 contiguous nt differing by 0, 1, 2, or 3 nt from a first strand of: AD-35551.4 (SEQ ID NO: 464), or a modified or unmodified variant thereof.

[0398] A RNAi agent comprising a first and a second strand, wherein the first strand comprises at least 15 contiguous nt differing by 0, 1, 2, or 3 nt from a first strand of: AD-35563.4 (SEQ ID NO: 465), or a modified or unmodified variant thereof.

[0399] A RNAi agent comprising a first and a second strand, wherein the first strand comprises at least 15 contiguous nt differing by 0, 1, 2, or 3 nt from a first strand of: AD-35528.4 (SEQ ID NO: 466), or a modified or unmodified variant thereof.

[0400] A RNAi agent comprising a first and a second strand, wherein the first strand comprises at least 15 contiguous nt differing by 0, 1, 2, or 3 nt from a first strand of: AD-35540.4 (SEQ ID NO: 467), or a modified or unmodified variant thereof.

[0401] A RNAi agent comprising a first and a second strand, wherein the first strand comprises at least 15 contiguous nt differing by 0, 1, 2, or 3 nt from a first strand of: AD-35546.4 (SEQ ID NO: 468), or a modified or unmodified variant thereof.

[0402] A RNAi agent comprising a first and a second strand, wherein the first strand comprises at least 15 contiguous nt differing by 0, 1, 2, or 3 nt from a first strand of: AD-35552.4 (SEQ ID NO: 469), or a modified or unmodified variant thereof.

[0403] A RNAi agent comprising a first and a second strand, wherein the first strand comprises at least 15 contiguous nt differing by 0, 1, 2, or 3 nt from a first strand of: AD-35558.4 (SEQ ID NO: 470), or a modified or unmodified variant thereof.

[0404] A RNAi agent comprising a first and a second strand, wherein the first strand comprises at least 15 contiguous nt differing by 0, 1, 2, or 3 nt from a first strand of: AD-35564.4 (SEQ ID NO: 471), or a modified or unmodified variant thereof.

[0405] A RNAi agent comprising a first and a second strand, wherein the first strand comprises at least 15 contiguous nt differing by 0, 1, 2, or 3 nt from a first strand of: AD-35570.4 (SEQ ID NO: 472), or a modified or unmodified variant thereof.

[0406] A RNAi agent comprising a first and a second strand, wherein the first strand comprises at least 15 contiguous nt differing by 0, 1, 2, or 3 nt from a first strand of: AD-35571.4 (SEQ ID NO: 473), or a modified or unmodified variant thereof.

[0407] A RNAi agent comprising a first and a second strand, wherein the first strand comprises at least 15 contiguous nt differing by 0, 1, 2, or 3 nt from a first strand of: AD-35577.4 (SEQ ID NO: 474), or a modified or unmodified variant thereof.

[0408] A RNAi agent comprising a first and a second strand, wherein the first strand comprises at least 15 contiguous nt differing by 0, 1, 2, or 3 nt from a first strand of: AD-35583.4 (SEQ ID NO: 475), or a modified or unmodified variant thereof.

[0409] A RNAi agent comprising a first and a second strand, wherein the first strand comprises at least 15 contiguous nt differing by 0, 1, 2, or 3 nt from a first strand of: AD-35589.4 (SEQ ID NO: 476), or a modified or unmodified variant thereof.

[0410] A RNAi agent comprising a first and a second strand, wherein the first strand comprises at least 15 contiguous nt differing by 0, 1, 2, or 3 nt from a first strand of: AD-35595.4 (SEQ ID NO: 477), or a modified or unmodified variant thereof.

[0411] A RNAi agent comprising a first and a second strand, wherein the first strand comprises at least 15 contiguous nt differing by 0, 1, 2, or 3 nt from a first strand of: AD-35601.4 (SEQ ID NO: 478), or a modified or unmodified variant thereof.

[0412] A RNAi agent comprising a first and a second strand, wherein the first strand comprises at least 15 contiguous nt differing by 0, 1, 2, or 3 nt from a first strand of: AD-35607.4 (SEQ ID NO: 479), or a modified or unmodified variant thereof.

[0413] A RNAi agent comprising a first and a second strand, wherein the first strand comprises at least 15 contiguous nt differing by 0, 1, 2, or 3 nt from a first strand of: AD-35613.4 (SEQ ID NO: 480), or a modified or unmodified variant thereof.

[0414] A RNAi agent comprising a first and a second strand, wherein the first strand comprises at least 15 contiguous nt differing by 0, 1, 2, or 3 nt from a first strand of: AD-35572.4 (SEQ ID NO: 481), or a modified or unmodified variant thereof.

[0415] A RNAi agent comprising a first and a second strand, wherein the first strand comprises at least 15 contiguous nt differing by 0, 1, 2, or 3 nt from a first strand of: AD-35578.4 (SEQ ID NO: 482), or a modified or unmodified variant thereof.

[0416] A RNAi agent comprising a first and a second strand, wherein the first strand comprises at least 15 contiguous nt differing by 0, 1, 2, or 3 nt from a first strand of: AD-35584.4 (SEQ ID NO: 483), or a modified or unmodified variant thereof.

[0417] A RNAi agent comprising a first and a second strand, wherein the first strand comprises at least 15 contiguous nt differing by 0, 1, 2, or 3 nt from a first strand of: AD-35590.4 (SEQ ID NO: 484), or a modified or unmodified variant thereof.

[0418] A RNAi agent comprising a first and a second strand, wherein the first strand comprises at least 15 contiguous nt differing by 0, 1, 2, or 3 nt from a first strand of: AD-35596.4 (SEQ ID NO: 485), or a modified or unmodified variant thereof.

[0419] A RNAi agent comprising a first and a second strand, wherein the first strand comprises at least 15 contiguous nt differing by 0, 1, 2, or 3 nt from a first strand of: AD-35602.4 (SEQ ID NO: 486), or a modified or unmodified variant thereof.

[0420] A RNAi agent comprising a first and a second strand, wherein the first strand comprises at least 15 contiguous nt differing by 0, 1, 2, or 3 nt from a first strand of: AD-35608.4 (SEQ ID NO: 487), or a modified or unmodified variant thereof.

[0421] A RNAi agent comprising a first and a second strand, wherein the first strand comprises at least 15 contiguous nt differing by 0, 1, 2, or 3 nt from a first strand of: AD-35614.4 (SEQ ID NO: 488), or a modified or unmodified variant thereof.

[0422] A RNAi agent comprising a first and a second strand, wherein the first strand comprises at least 15 contiguous nt differing by 0, 1, 2, or 3 nt from a first strand of: AD-35573.4 (SEQ ID NO: 489), or a modified or unmodified variant thereof.

[0423] A RNAi agent comprising a first and a second strand, wherein the first strand comprises at least 15 contiguous nt differing by 0, 1, 2, or 3 nt from a first strand of: AD-35579.4 (SEQ ID NO: 490), or a modified or unmodified variant thereof.

[0424] A RNAi agent comprising a first and a second strand, wherein the first strand comprises at least 15 contiguous nt differing by 0, 1, 2, or 3 nt from a first strand of: AD-35585.4 (SEQ ID NO: 491), or a modified or unmodified variant thereof.

[0425] A RNAi agent comprising a first and a second strand, wherein the first strand comprises at least 15 contiguous nt differing by 0, 1, 2, or 3 nt from a first strand of: AD-35591.4 (SEQ ID NO: 492), or a modified or unmodified variant thereof.

[0426] A RNAi agent comprising a first and a second strand, wherein the first strand comprises at least 15 contiguous nt differing by 0, 1, 2, or 3 nt from a first strand of: AD-35597.4 (SEQ ID NO: 493), or a modified or unmodified variant thereof.

[0427] A RNAi agent comprising a first and a second strand, wherein the first strand comprises at least 15 contiguous nt differing by 0, 1, 2, or 3 nt from a first strand of: AD-35603.4 (SEQ ID NO: 494), or a modified or unmodified variant thereof.

[0428] A RNAi agent comprising a first and a second strand, wherein the first strand comprises at least 15 contiguous nt differing by 0, 1, 2, or 3 nt from a first strand of: AD-35609.4 (SEQ ID NO: 495), or a modified or unmodified variant thereof.

[0429] A RNAi agent comprising a first and a second strand, wherein the first strand comprises at least 15 contiguous nt differing by 0, 1, 2, or 3 nt from a first strand of: AD-35615.4 (SEQ ID NO: 496), or a modified or unmodified variant thereof.

[0430] A RNAi agent comprising a first and a second strand, wherein the first strand comprises at least 15 contiguous nt differing by 0, 1, 2, or 3 nt from a first strand of: AD-35574.4 (SEQ ID NO: 497), or a modified or unmodified variant thereof.

[0431] A RNAi agent comprising a first and a second strand, wherein the first strand comprises at least 15 contiguous nt differing by 0, 1, 2, or 3 nt from a first strand of: AD-35580.1 (SEQ ID NO: 498), or a modified or unmodified variant thereof.

[0432] A RNAi agent comprising a first and a second strand, wherein the first strand comprises at least 15 contiguous nt differing by 0, 1, 2, or 3 nt from a first strand of: AD-35586.4 (SEQ ID NO: 499), or a modified or unmodified variant thereof.

[0433] A RNAi agent comprising a first and a second strand, wherein the first strand comprises at least 15 contiguous nt differing by 0, 1, 2, or 3 nt from a first strand of: AD-35592.4 (SEQ ID NO: 500), or a modified or unmodified variant thereof.

[0434] A RNAi agent comprising a first and a second strand, wherein the first strand comprises at least 15 contiguous nt differing by 0, 1, 2, or 3 nt from a first strand of: AD-35598.4 (SEQ ID NO: 501), or a modified or unmodified variant thereof.

[0435] A RNAi agent comprising a first and a second strand, wherein the first strand comprises at least 15 contiguous nt differing by 0, 1, 2, or 3 nt from a first strand of: AD-35604.4 (SEQ ID NO: 502), or a modified or unmodified variant thereof.

[0436] A RNAi agent comprising a first and a second strand, wherein the first strand comprises at least 15 contiguous nt differing by 0, 1, 2, or 3 nt from a first strand of: AD-35610.4 (SEQ ID NO: 503), or a modified or unmodified variant thereof.

[0437] A RNAi agent comprising a first and a second strand, wherein the first strand comprises at least 15 contiguous nt differing by 0, 1, 2, or 3 nt from a first strand of: AD-35616.4 (SEQ ID NO: 504), or a modified or unmodified variant thereof.

[0438] A RNAi agent comprising a first and a second strand, wherein the first strand comprises at least 15 contiguous nt differing by 0, 1, 2, or 3 nt from a first strand of: AD-35575.4 (SEQ ID NO: 505), or a modified or unmodified variant thereof.

[0439] A RNAi agent comprising a first and a second strand, wherein the first strand comprises at least 15 contiguous nt differing by 0, 1, 2, or 3 nt from a first strand of: AD-35581.4 (SEQ ID NO: 506), or a modified or unmodified variant thereof.

[0440] A RNAi agent comprising a first and a second strand, wherein the first strand comprises at least 15 contiguous nt differing by 0, 1, 2, or 3 nt from a first strand of: AD-35587.4 (SEQ ID NO: 507), or a modified or unmodified variant thereof.

[0441] A RNAi agent comprising a first and a second strand, wherein the first strand comprises at least 15 contiguous nt differing by 0, 1, 2, or 3 nt from a first strand of: AD-35593.4 (SEQ ID NO: 508), or a modified or unmodified variant thereof.

[0442] A RNAi agent comprising a first and a second strand, wherein the first strand comprises at least 15 contiguous nt differing by 0, 1, 2, or 3 nt from a first strand of: AD-35599.4 (SEQ ID NO: 509), or a modified or unmodified variant thereof.

[0443] A RNAi agent comprising a first and a second strand, wherein the first strand comprises at least 15 contiguous nt differing by 0, 1, 2, or 3 nt from a first strand of: AD-35605.4 (SEQ ID NO: 510), or a modified or unmodified variant thereof.

[0444] A RNAi agent comprising a first and a second strand, wherein the first strand comprises at least 15 contiguous nt differing by 0, 1, 2, or 3 nt from a first strand of: AD-35611.4 (SEQ ID NO: 511), or a modified or unmodified variant thereof.

[0445] A RNAi agent comprising a first and a second strand, wherein the first strand comprises at least 15 contiguous nt differing by 0, 1, 2, or 3 nt from a first strand of: AD-35617.4 (SEQ ID NO: 512), or a modified or unmodified variant thereof.

[0446] A RNAi agent comprising a first and a second strand, wherein the first strand comprises at least 15 contiguous nt differing by 0, 1, 2, or 3 nt from a first strand of: AD-35576.4 (SEQ ID NO: 513), or a modified or unmodified variant thereof.

[0447] A RNAi agent comprising a first and a second strand, wherein the first strand comprises at least 15 contiguous nt differing by 0, 1, 2, or 3 nt from a first strand of: AD-35588.4 (SEQ ID NO: 514), or a modified or unmodified variant thereof.

[0448] A RNAi agent comprising a first and a second strand, wherein the first strand comprises at least 15 contiguous nt differing by 0, 1, 2, or 3 nt from a first strand of: AD-35667.1 (SEQ ID NO: 515), or a modified or unmodified variant thereof.

[0449] A RNAi agent comprising a first and a second strand, wherein the first strand comprises at least 15 contiguous nt differing by 0, 1, 2, or 3 nt from a first strand of: AD-35673.1 (SEQ ID NO: 516), or a modified or unmodified variant thereof.

[0450] A RNAi agent comprising a first and a second strand, wherein the first strand comprises at least 15 contiguous nt differing by 0, 1, 2, or 3 nt from a first strand of: AD-35679.1 (SEQ ID NO: 517), or a modified or unmodified variant thereof.

[0451] A RNAi agent comprising a first and a second strand, wherein the first strand comprises at least 15 contiguous nt differing by 0, 1, 2, or 3 nt from a first strand of: AD-35685.1 (SEQ ID NO: 518), or a modified or unmodified variant thereof.

[0452] A RNAi agent comprising a first and a second strand, wherein the first strand comprises at least 15 contiguous nt differing by 0, 1, 2, or 3 nt from a first strand of: AD-35691.1 (SEQ ID NO: 519), or a modified or unmodified variant thereof.

[0453] A RNAi agent comprising a first and a second strand, wherein the first strand comprises at least 15 contiguous nt differing by 0, 1, 2, or 3 nt from a first strand of: AD-35557.1 (SEQ ID NO: 520), or a modified or unmodified variant thereof.

[0454] A RNAi agent comprising a first and a second strand, wherein the first strand comprises at least 15 contiguous nt differing by 0, 1, 2, or 3 nt from a first strand of: AD-35618.1 (SEQ ID NO: 521), or a modified or unmodified variant thereof.

[0455] A RNAi agent comprising a first and a second strand, wherein the first strand comprises at least 15 contiguous nt differing by 0, 1, 2, or 3 nt from a first strand of: AD-35569.1 (SEQ ID NO: 522), or a modified or unmodified variant thereof.

[0456] A RNAi agent comprising a first and a second strand, wherein the first strand comprises at least 15 contiguous nt differing by 0, 1, 2, or 3 nt from a first strand of: AD-35534.1 (SEQ ID NO: 523), or a modified or unmodified variant thereof.

[0457] A RNAi agent comprising a first and a second strand, wherein the first strand comprises at least 15 contiguous nt differing by 0, 1, 2, or 3 nt from a first strand of: AD-35582.1 (SEQ ID NO: 524), or a modified or unmodified variant thereof.

[0458] A RNAi agent comprising a first and a second strand, wherein the first strand comprises at least 15 contiguous nt differing by 0, 1, 2, or 3 nt from a first strand of: AD-35594.1 (SEQ ID NO: 525), or a modified or unmodified variant thereof.

[0459] A RNAi agent comprising a first and a second strand, wherein the first strand comprises at least 15 contiguous nt differing by 0, 1, 2, or 3 nt from a first strand of: AD-35600.1 (SEQ ID NO: 526), or a modified or unmodified variant thereof.

[0460] A RNAi agent comprising a first and a second strand, wherein the first strand comprises at least 15 contiguous nt differing by 0, 1, 2, or 3 nt from a first strand of: AD-35606.1 (SEQ ID NO: 527), or a modified or unmodified variant thereof.

[0461] A RNAi agent comprising a first and a second strand, wherein the first strand comprises at least 15 contiguous nt differing by 0, 1, 2, or 3 nt from a first strand of: AD-35612.1 (SEQ ID NO: 528), or a modified or unmodified variant thereof.

[0462] A RNAi agent comprising a first and a second strand, wherein the first strand comprises at least 15 contiguous nt differing by 0, 1, 2, or 3 nt from a first strand of: AD-38127.1 (SEQ ID NO: 529), or a modified or unmodified variant thereof.

[0463] A RNAi agent comprising a first and a second strand, wherein the first strand comprises at least 15 contiguous nt differing by 0, 1, 2, or 3 nt from a first strand of: AD-38133.1 (SEQ ID NO: 530), or a modified or unmodified variant thereof.

[0464] A RNAi agent comprising a first and a second strand, wherein the first strand comprises at least 15 contiguous nt differing by 0, 1, 2, or 3 nt from a first strand of: AD-38139.1 (SEQ ID NO: 531), or a modified or unmodified variant thereof.

[0465] A RNAi agent comprising a first and a second strand, wherein the first strand comprises at least 15 contiguous nt differing by 0, 1, 2, or 3 nt from a first strand of: AD-38145.1 (SEQ ID NO: 532), or a modified or unmodified variant thereof.

[0466] A RNAi agent comprising a first and a second strand, wherein the first strand comprises at least 15 contiguous nt differing by 0, 1, 2, or 3 nt from a first strand of: AD-38151.1 (SEQ ID NO: 533), or a modified or unmodified variant thereof.

[0467] A RNAi agent comprising a first and a second strand, wherein the first strand comprises at least 15 contiguous nt differing by 0, 1, 2, or 3 nt from a first strand of: AD-38157.1 (SEQ ID NO: 534), or a modified or unmodified variant thereof.

[0468] A RNAi agent comprising a first and a second strand, wherein the first strand comprises at least 15 contiguous nt differing by 0, 1, 2, or 3 nt from a first strand of: AD-38163.1 (SEQ ID NO: 535), or a modified or unmodified variant thereof.

[0469] A RNAi agent comprising a first and a second strand, wherein the first strand comprises at least 15 contiguous nt differing by 0, 1, 2, or 3 nt from a first strand of: AD-38169.1 (SEQ ID NO: 536), or a modified or unmodified variant thereof.

[0470] A RNAi agent comprising a first and a second strand, wherein the first strand comprises at least 15 contiguous nt differing by 0, 1, 2, or 3 nt from a first strand of: AD-38128.1 (SEQ ID NO: 537), or a modified or unmodified variant thereof.

[0471] A RNAi agent comprising a first and a second strand, wherein the first strand comprises at least 15 contiguous nt differing by 0, 1, 2, or 3 nt from a first strand of: AD-38134.1 (SEQ ID NO: 538), or a modified or unmodified variant thereof.

[0472] A RNAi agent comprising a first and a second strand, wherein the first strand comprises at least 15 contiguous nt differing by 0, 1, 2, or 3 nt from a first strand of: AD-38140.1 (SEQ ID NO: 539), or a modified or unmodified variant thereof.

[0473] A RNAi agent comprising a first and a second strand, wherein the first strand comprises at least 15 contiguous nt differing by 0, 1, 2, or 3 nt from a first strand of: AD-38146.1 (SEQ ID NO: 540), or a modified or unmodified variant thereof.

[0474] A RNAi agent comprising a first and a second strand, wherein the first strand comprises at least 15 contiguous nt differing by 0, 1, 2, or 3 nt from a first strand of: AD-38152.1 (SEQ ID NO: 541), or a modified or unmodified variant thereof.

[0475] A RNAi agent comprising a first and a second strand, wherein the first strand comprises at least 15 contiguous nt differing by 0, 1, 2, or 3 nt from a first strand of: AD-38158.1 (SEQ ID NO: 542), or a modified or unmodified variant thereof.

[0476] A RNAi agent comprising a first and a second strand, wherein the first strand comprises at least 15 contiguous nt differing by 0, 1, 2, or 3 nt from a first strand of: AD-38164.1 (SEQ ID NO: 543), or a modified or unmodified variant thereof.

[0477] A RNAi agent comprising a first and a second strand, wherein the first strand comprises at least 15 contiguous nt differing by 0, 1, 2, or 3 nt from a first strand of: AD-38170.1 (SEQ ID NO: 544), or a modified or unmodified variant thereof.

[0478] A RNAi agent comprising a first and a second strand, wherein the first strand comprises at least 15 contiguous nt differing by 0, 1, 2, or 3 nt from a first strand of: AD-38129.1 (SEQ ID NO: 545), or a modified or unmodified variant thereof.

[0479] A RNAi agent comprising a first and a second strand, wherein the first strand comprises at least 15 contiguous nt differing by 0, 1, 2, or 3 nt from a first strand of: AD-38135.1 (SEQ ID NO: 546), or a modified or unmodified variant thereof.

[0480] A RNAi agent comprising a first and a second strand, wherein the first strand comprises at least 15 contiguous nt differing by 0, 1, 2, or 3 nt from a first strand of: AD-38141.1 (SEQ ID NO: 547), or a modified or unmodified variant thereof.

[0481] A RNAi agent comprising a first and a second strand, wherein the first strand comprises at least 15 contiguous nt differing by 0, 1, 2, or 3 nt from a first strand of: AD-38147.1 (SEQ ID NO: 548), or a modified or unmodified variant thereof.

[0482] A RNAi agent comprising a first and a second strand, wherein the first strand comprises at least 15 contiguous nt differing by 0, 1, 2, or 3 nt from a first strand of: AD-38153.1 (SEQ ID NO: 549), or a modified or unmodified variant thereof.

[0483] A RNAi agent comprising a first and a second strand, wherein the first strand comprises at least 15 contiguous nt differing by 0, 1, 2, or 3 nt from a first strand of: AD-38159.1 (SEQ ID NO: 550), or a modified or unmodified variant thereof.

[0484] A RNAi agent comprising a first and a second strand, wherein the first strand comprises at least 15 contiguous nt differing by 0, 1, 2, or 3 nt from a first strand of: AD-38165.1 (SEQ ID NO: 551), or a modified or unmodified variant thereof.

[0485] A RNAi agent comprising a first and a second strand, wherein the first strand comprises at least 15 contiguous nt differing by 0, 1, 2, or 3 nt from a first strand of: AD-38171.1 (SEQ ID NO: 552), or a modified or unmodified variant thereof.

[0486] A RNAi agent comprising a first and a second strand, wherein the first strand comprises at least 15 contiguous nt differing by 0, 1, 2, or 3 nt from a first strand of: AD-38130.1 (SEQ ID NO: 553), or a modified or unmodified variant thereof.

[0487] A RNAi agent comprising a first and a second strand, wherein the first strand comprises at least 15 contiguous nt differing by 0, 1, 2, or 3 nt from a first strand of: AD-38136.1 (SEQ ID NO: 554), or a modified or unmodified variant thereof.

[0488] A RNAi agent comprising a first and a second strand, wherein the first strand comprises at least 15 contiguous nt differing by 0, 1, 2, or 3 nt from a first strand of: AD-38142.1 (SEQ ID NO: 555), or a modified or unmodified variant thereof.

[0489] A RNAi agent comprising a first and a second strand, wherein the first strand comprises at least 15 contiguous nt differing by 0, 1, 2, or 3 nt from a first strand of: AD-38148.1 (SEQ ID NO: 556), or a modified or unmodified variant thereof.

[0490] A RNAi agent comprising a first and a second strand, wherein the first strand comprises at least 15 contiguous nt differing by 0, 1, 2, or 3 nt from a first strand of: AD-38154.1 (SEQ ID NO: 557), or a modified or unmodified variant thereof.

[0491] A RNAi agent comprising a first and a second strand, wherein the first strand comprises at least 15 contiguous nt differing by 0, 1, 2, or 3 nt from a first strand of: AD-38160.1 (SEQ ID NO: 558), or a modified or unmodified variant thereof.

[0492] A RNAi agent comprising a first and a second strand, wherein the first strand comprises at least 15 contiguous nt differing by 0, 1, 2, or 3 nt from a first strand of: AD-38166.1 (SEQ ID NO: 559), or a modified or unmodified variant thereof.

[0493] A RNAi agent comprising a first and a second strand, wherein the first strand comprises at least 15 contiguous nt differing by 0, 1, 2, or 3 nt from a first strand of: AD-38172.1 (SEQ ID NO: 560), or a modified or unmodified variant thereof.

[0494] A RNAi agent comprising a first and a second strand, wherein the first strand comprises at least 15 contiguous nt differing by 0, 1, 2, or 3 nt from a first strand of: AD-38131.1 (SEQ ID NO: 561), or a modified or unmodified variant thereof.

[0495] A RNAi agent comprising a first and a second strand, wherein the first strand comprises at least 15 contiguous nt differing by 0, 1, 2, or 3 nt from a first strand of: AD-38137.1 (SEQ ID NO: 562), or a modified or unmodified variant thereof.

[0496] A RNAi agent comprising a first and a second strand, wherein the first strand comprises at least 15 contiguous nt differing by 0, 1, 2, or 3 nt from a first strand of: AD-38143.1 (SEQ ID NO: 563), or a modified or unmodified variant thereof.

[0497] A RNAi agent comprising a first and a second strand, wherein the first strand comprises at least 15 contiguous nt differing by 0, 1, 2, or 3 nt from a first strand of: AD-38149.1 (SEQ ID NO: 564), or a modified or unmodified variant thereof.

[0498] A RNAi agent comprising a first and a second strand, wherein the first strand comprises at least 15 contiguous nt differing by 0, 1, 2, or 3 nt from a first strand of: AD-38155.1 (SEQ ID NO: 565), or a modified or unmodified variant thereof.

[0499] A RNAi agent comprising a first and a second strand, wherein the first strand comprises at least 15 contiguous nt differing by 0, 1, 2, or 3 nt from a first strand of: AD-38161.1 (SEQ ID NO: 566), or a modified or unmodified variant thereof.

[0500] A RNAi agent comprising a first and a second strand, wherein the first strand comprises at least 15 contiguous nt differing by 0, 1, 2, or 3 nt from a first strand of: AD-38167.1 (SEQ ID NO: 567), or a modified or unmodified variant thereof.

[0501] A RNAi agent comprising a first and a second strand, wherein the first strand comprises at least 15 contiguous nt differing by 0, 1, 2, or 3 nt from a first strand of: AD-38173.1 (SEQ ID NO: 568), or a modified or unmodified variant thereof.

[0502] A RNAi agent comprising a first and a second strand, wherein the first strand comprises at least 15 contiguous nt differing by 0, 1, 2, or 3 nt from a first strand of: AD-38132.1 (SEQ ID NO: 569), or a modified or unmodified variant thereof.

[0503] A RNAi agent comprising a first and a second strand, wherein the first strand comprises at least 15 contiguous nt differing by 0, 1, 2, or 3 nt from a first strand of: AD-38138.1 (SEQ ID NO: 570), or a modified or unmodified variant thereof.

[0504] A RNAi agent comprising a first and a second strand, wherein the first strand comprises at least 15 contiguous nt differing by 0, 1, 2, or 3 nt from a first strand of: AD-38144.1 (SEQ ID NO: 571), or a modified or unmodified variant thereof.

[0505] A RNAi agent comprising a first and a second strand, wherein the first strand comprises at least 15 contiguous nt differing by 0, 1, 2, or 3 nt from a first strand of: AD-38150.1 (SEQ ID NO: 572), or a modified or unmodified variant thereof.

[0506] A RNAi agent comprising a first and a second strand, wherein the first strand comprises at least 15 contiguous nt differing by 0, 1, 2, or 3 nt from a first strand of: AD-38156.1 (SEQ ID NO: 573), or a modified or unmodified variant thereof.

[0507] A RNAi agent comprising a first and a second strand, wherein the first strand comprises at least 15 contiguous nt differing by 0, 1, 2, or 3 nt from a first strand of: AD-38162.1 (SEQ ID NO: 574), or a modified or unmodified variant thereof.

[0508] A RNAi agent comprising a first and a second strand, wherein the first strand comprises at least 15 contiguous nt differing by 0, 1, 2, or 3 nt from a first strand of: AD-38168.1 (SEQ ID NO: 575), or a modified or unmodified variant thereof.

[0509] A RNAi agent comprising a first and a second strand, wherein the first strand comprises at least 15 contiguous nt differing by 0, 1, 2, or 3 nt from a first strand of: AD-38174.1 (SEQ ID NO: 576), or a modified or unmodified variant thereof.

[0510] A RNAi agent comprising a first and a second strand, wherein the first strand comprises at least 15 contiguous nt differing by 0, 1, 2, or 3 nt from a first strand of: AD-39683.1 (SEQ ID NO: 577), or a modified or unmodified variant thereof.

[0511] A RNAi agent comprising a first and a second strand, wherein the first strand comprises at least 15 contiguous nt differing by 0, 1, 2, or 3 nt from a first strand of: AD-39689.1 (SEQ ID NO: 578), or a modified or unmodified variant thereof.

[0512] A RNAi agent comprising a first and a second strand, wherein the first strand comprises at least 15 contiguous nt differing by 0, 1, 2, or 3 nt from a first strand of: AD-39695.1 (SEQ ID NO: 579), or a modified or unmodified variant thereof.

[0513] A RNAi agent comprising a first and a second strand, wherein the first strand comprises at least 15 contiguous nt differing by 0, 1, 2, or 3 nt from a first strand of: AD-39701.1 (SEQ ID NO: 580), or a modified or unmodified variant thereof.

[0514] A RNAi agent comprising a first and a second strand, wherein the first strand comprises at least 15 contiguous nt differing by 0, 1, 2, or 3 nt from a first strand of: AD-39707.1 (SEQ ID NO: 581), or a modified or unmodified variant thereof.

[0515] A RNAi agent comprising a first and a second strand, wherein the first strand comprises at least 15 contiguous nt differing by 0, 1, 2, or 3 nt from a first strand of: AD-39713.1 (SEQ ID NO: 582), or a modified or unmodified variant thereof.

[0516] A RNAi agent comprising a first and a second strand, wherein the first strand comprises at least 15 contiguous nt differing by 0, 1, 2, or 3 nt from a first strand of: AD-39719.1 (SEQ ID NO: 583), or a modified or unmodified variant thereof.

[0517] A RNAi agent comprising a first and a second strand, wherein the first strand comprises at least 15 contiguous nt differing by 0, 1, 2, or 3 nt from a first strand of: AD-39725.1 (SEQ ID NO: 584), or a modified or unmodified variant thereof.

[0518] A RNAi agent comprising a first and a second strand, wherein the first strand comprises at least 15 contiguous nt differing by 0, 1, 2, or 3 nt from a first strand of: AD-39684.1 (SEQ ID NO: 585), or a modified or unmodified variant thereof.

[0519] A RNAi agent comprising a first and a second strand, wherein the first strand comprises at least 15 contiguous nt differing by 0, 1, 2, or 3 nt from a first strand of: AD-39690.1 (SEQ ID NO: 586), or a modified or unmodified variant thereof.

[0520] A RNAi agent comprising a first and a second strand, wherein the first strand comprises at least 15 contiguous nt differing by 0, 1, 2, or 3 nt from a first strand of: AD-39696.1 (SEQ ID NO: 587), or a modified or unmodified variant thereof.

[0521] A RNAi agent comprising a first and a second strand, wherein the first strand comprises at least 15 contiguous nt differing by 0, 1, 2, or 3 nt from a first strand of: AD-39702.1 (SEQ ID NO: 588), or a modified or unmodified variant thereof.

[0522] A RNAi agent comprising a first and a second strand, wherein the first strand comprises at least 15 contiguous nt differing by 0, 1, 2, or 3 nt from a first strand of: AD-39708.1 (SEQ ID NO: 589), or a modified or unmodified variant thereof.

[0523] A RNAi agent comprising a first and a second strand, wherein the first strand comprises at least 15 contiguous nt differing by 0, 1, 2, or 3 nt from a first strand of: AD-39714.1 (SEQ ID NO: 590), or a modified or unmodified variant thereof.

[0524] A RNAi agent comprising a first and a second strand, wherein the first strand comprises at least 15 contiguous nt differing by 0, 1, 2, or 3 nt from a first strand of: AD-39720.1 (SEQ ID NO: 591), or a modified or unmodified variant thereof.

[0525] A RNAi agent comprising a first and a second strand, wherein the first strand comprises at least 15 contiguous nt differing by 0, 1, 2, or 3 nt from a first strand of: AD-39726.1 (SEQ ID NO: 592), or a modified or unmodified variant thereof.

[0526] A RNAi agent comprising a first and a second strand, wherein the first strand comprises at least 15 contiguous nt differing by 0, 1, 2, or 3 nt from a first strand of: AD-39685.1 (SEQ ID NO: 593), or a modified or unmodified variant thereof.

[0527] A RNAi agent comprising a first and a second strand, wherein the first strand comprises at least 15 contiguous nt differing by 0, 1, 2, or 3 nt from a first strand of: AD-39691.1 (SEQ ID NO: 594), or a modified or unmodified variant thereof.

[0528] A RNAi agent comprising a first and a second strand, wherein the first strand comprises at least 15 contiguous nt differing by 0, 1, 2, or 3 nt from a first strand of: AD-39697.1 (SEQ ID NO: 595), or a modified or unmodified variant thereof.

[0529] A RNAi agent comprising a first and a second strand, wherein the first strand comprises at least 15 contiguous nt differing by 0, 1, 2, or 3 nt from a first strand of: AD-39703.1 (SEQ ID NO: 596), or a modified or unmodified variant thereof.

[0530] A RNAi agent comprising a first and a second strand, wherein the first strand comprises at least 15 contiguous nt differing by 0, 1, 2, or 3 nt from a first strand of: AD-39709.1 (SEQ ID NO: 597), or a modified or unmodified variant thereof.

[0531] A RNAi agent comprising a first and a second strand, wherein the first strand comprises at least 15 contiguous nt differing by 0, 1, 2, or 3 nt from a first strand of: AD-39715.1 (SEQ ID NO: 598), or a modified or unmodified variant thereof.

[0532] A RNAi agent comprising a first and a second strand, wherein the first strand comprises at least 15 contiguous nt differing by 0, 1, 2, or 3 nt from a first strand of: AD-39721.1 (SEQ ID NO: 599), or a modified or unmodified variant thereof.

[0533] A RNAi agent comprising a first and a second strand, wherein the first strand comprises at least 15 contiguous nt differing by 0, 1, 2, or 3 nt from a first strand of: AD-39727.1 (SEQ ID NO: 600), or a modified or unmodified variant thereof.

[0534] A RNAi agent comprising a first and a second strand, wherein the first strand comprises at least 15 contiguous nt differing by 0, 1, 2, or 3 nt from a first strand of: AD-39686.1 (SEQ ID NO: 601), or a modified or unmodified variant thereof.

[0535] A RNAi agent comprising a first and a second strand, wherein the first strand comprises at least 15 contiguous nt differing by 0, 1, 2, or 3 nt from a first strand of: AD-39692.1 (SEQ ID NO: 602), or a modified or unmodified variant thereof.

[0536] A RNAi agent comprising a first and a second strand, wherein the first strand comprises at least 15 contiguous nt differing by 0, 1, 2, or 3 nt from a first strand of: AD-39698.1 (SEQ ID NO: 603), or a modified or unmodified variant thereof.

[0537] A RNAi agent comprising a first and a second strand, wherein the first strand comprises at least 15 contiguous nt differing by 0, 1, 2, or 3 nt from a first strand of: AD-39704.1 (SEQ ID NO: 604), or a modified or unmodified variant thereof.

[0538] A RNAi agent comprising a first and a second strand, wherein the first strand comprises at least 15 contiguous nt differing by 0, 1, 2, or 3 nt from a first strand of: AD-39710.1 (SEQ ID NO: 605), or a modified or unmodified variant thereof.

[0539] A RNAi agent comprising a first and a second strand, wherein the first strand comprises at least 15 contiguous nt differing by 0, 1, 2, or 3 nt from a first strand of: AD-39716.1 (SEQ ID NO: 606), or a modified or unmodified variant thereof.

[0540] A RNAi agent comprising a first and a second strand, wherein the first strand comprises at least 15 contiguous nt differing by 0, 1, 2, or 3 nt from a first strand of: AD-39722.1 (SEQ ID NO: 607), or a modified or unmodified variant thereof.

[0541] A RNAi agent comprising a first and a second strand, wherein the first strand comprises at least 15 contiguous nt differing by 0, 1, 2, or 3 nt from a first strand of: AD-39728.1 (SEQ ID NO: 608), or a modified or unmodified variant thereof.

[0542] A RNAi agent comprising a first and a second strand, wherein the first strand comprises at least 15 contiguous nt differing by 0, 1, 2, or 3 nt from a first strand of: AD-39687.1 (SEQ ID NO: 609), or a modified or unmodified variant thereof.

[0543] A RNAi agent comprising a first and a second strand, wherein the first strand comprises at least 15 contiguous nt differing by 0, 1, 2, or 3 nt from a first strand of: AD-39693.1 (SEQ ID NO: 610), or a modified or unmodified variant thereof.

[0544] A RNAi agent comprising a first and a second strand, wherein the first strand comprises at least 15 contiguous nt differing by 0, 1, 2, or 3 nt from a first strand of: AD-39699.1 (SEQ ID NO: 611), or a modified or unmodified variant thereof.

[0545] A RNAi agent comprising a first and a second strand, wherein the first strand comprises at least 15 contiguous nt differing by 0, 1, 2, or 3 nt from a first strand of: AD-39705.1 (SEQ ID NO: 612), or a modified or unmodified variant thereof.

[0546] A RNAi agent comprising a first and a second strand, wherein the first strand comprises at least 15 contiguous nt differing by 0, 1, 2, or 3 nt from a first strand of: AD-39711.1 (SEQ ID NO: 613), or a modified or unmodified variant thereof.

[0547] A RNAi agent comprising a first and a second strand, wherein the first strand comprises at least 15 contiguous nt differing by 0, 1, 2, or 3 nt from a first strand of: AD-39717.1 (SEQ ID NO: 614), or a modified or unmodified variant thereof.

[0548] A RNAi agent comprising a first and a second strand, wherein the first strand comprises at least 15 contiguous nt differing by 0, 1, 2, or 3 nt from a first strand of: AD-39723.1 (SEQ ID NO: 615), or a modified or unmodified variant thereof.

[0549] A RNAi agent comprising a first and a second strand, wherein the first strand comprises at least 15 contiguous nt differing by 0, 1, 2, or 3 nt from a first strand of: AD-39729.1 (SEQ ID NO: 616), or a modified or unmodified variant thereof.

[0550] A RNAi agent comprising a first and a second strand, wherein the first strand comprises at least 15 contiguous nt differing by 0, 1, 2, or 3 nt from a first strand of: AD-39688.1 (SEQ ID NO: 617), or a modified or unmodified variant thereof.

[0551] A RNAi agent comprising a first and a second strand, wherein the first strand comprises at least 15 contiguous nt differing by 0, 1, 2, or 3 nt from a first strand of: AD-39694.1 (SEQ ID NO: 618), or a modified or unmodified variant thereof.

[0552] A RNAi agent comprising a first and a second strand, wherein the first strand comprises at least 15 contiguous nt differing by 0, 1, 2, or 3 nt from a first strand of: AD-39700.1 (SEQ ID NO: 619), or a modified or unmodified variant thereof.

[0553] A RNAi agent comprising a first and a second strand, wherein the first strand comprises at least 15 contiguous nt differing by 0, 1, 2, or 3 nt from a first strand of: AD-39706.1 (SEQ ID NO: 620), or a modified or unmodified variant thereof.

[0554] A RNAi agent comprising a first and a second strand, wherein the first strand comprises at least 15 contiguous nt differing by 0, 1, 2, or 3 nt from a first strand of: AD-39712.1 (SEQ ID NO: 621), or a modified or unmodified variant thereof.

[0555] A RNAi agent comprising a first and a second strand, wherein the first strand comprises at least 15 contiguous nt differing by 0, 1, 2, or 3 nt from a first strand of: AD-39718.1 (SEQ ID NO: 622), or a modified or unmodified variant thereof.

[0556] A RNAi agent comprising a first and a second strand, wherein the first strand comprises at least 15 contiguous nt differing by 0, 1, 2, or 3 nt from a first strand of: AD-39724.1 (SEQ ID NO: 623), or a modified or unmodified variant thereof.

[0557] A RNAi agent comprising a first and a second strand, wherein the first strand comprises at least 15 contiguous nt differing by 0, 1, 2, or 3 nt from a first strand of: AD-39730.1 (SEQ ID NO: 624), or a modified or unmodified variant thereof.

[0558] A RNAi agent comprising a first and a second strand, wherein the first strand comprises at least 15 contiguous nt differing by 0, 1, 2, or 3 nt from a first strand of: AD-39736.1 (SEQ ID NO: 625), or a modified or unmodified variant thereof.

[0559] A RNAi agent comprising a first and a second strand, wherein the first strand comprises at least 15 contiguous nt differing by 0, 1, 2, or 3 nt from a first strand of: AD-39742.1 (SEQ ID NO: 626), or a modified or unmodified variant thereof.

[0560] A RNAi agent comprising a first and a second strand, wherein the first strand comprises at least 15 contiguous nt differing by 0, 1, 2, or 3 nt from a first strand of: AD-39748.1 (SEQ ID NO: 627), or a modified or unmodified variant thereof.

[0561] A RNAi agent comprising a first and a second strand, wherein the first strand comprises at least 15 contiguous nt differing by 0, 1, 2, or 3 nt from a first strand of: AD-39754.1 (SEQ ID NO: 628), or a modified or unmodified variant thereof.

[0562] A RNAi agent comprising a first and a second strand, wherein the first strand comprises at least 15 contiguous nt differing by 0, 1, 2, or 3 nt from a first strand of: AD-39760.1 (SEQ ID NO: 629), or a modified or unmodified variant thereof.

[0563] A RNAi agent comprising a first and a second strand, wherein the first strand comprises at least 15 contiguous nt differing by 0, 1, 2, or 3 nt from a first strand of: AD-39766.1 (SEQ ID NO: 630), or a modified or unmodified variant thereof.

[0564] A RNAi agent comprising a first and a second strand, wherein the first strand comprises at least 15 contiguous nt differing by 0, 1, 2, or 3 nt from a first strand of: AD-39772.1 (SEQ ID NO: 631), or a modified or unmodified variant thereof.

[0565] A RNAi agent comprising a first and a second strand, wherein the first strand comprises at least 15 contiguous nt differing by 0, 1, 2, or 3 nt from a first strand of: AD-39731.1 (SEQ ID NO: 632), or a modified or unmodified variant thereof.

[0566] A RNAi agent comprising a first and a second strand, wherein the first strand comprises at least 15 contiguous nt differing by 0, 1, 2, or 3 nt from a first strand of: AD-39737.1 (SEQ ID NO: 633), or a modified or unmodified variant thereof.

[0567] A RNAi agent comprising a first and a second strand, wherein the first strand comprises at least 15 contiguous nt differing by 0, 1, 2, or 3 nt from a first strand of: AD-39743.1 (SEQ ID NO: 634), or a modified or unmodified variant thereof.

[0568] A RNAi agent comprising a first and a second strand, wherein the first strand comprises at least 15 contiguous nt differing by 0, 1, 2, or 3 nt from a first strand of: AD-39749.1 (SEQ ID NO: 635), or a modified or unmodified variant thereof.

[0569] A RNAi agent comprising a first and a second strand, wherein the first strand comprises at least 15 contiguous nt differing by 0, 1, 2, or 3 nt from a first strand of: AD-39755.1 (SEQ ID NO: 636), or a modified or unmodified variant thereof.

[0570] A RNAi agent comprising a first and a second strand, wherein the first strand comprises at least 15 contiguous nt differing by 0, 1, 2, or 3 nt from a first strand of: AD-39761.1 (SEQ ID NO: 637), or a modified or unmodified variant thereof.

[0571] A RNAi agent comprising a first and a second strand, wherein the first strand comprises at least 15 contiguous nt differing by 0, 1, 2, or 3 nt from a first strand of: AD-39767.1 (SEQ ID NO: 638), or a modified or unmodified variant thereof.

[0572] A RNAi agent comprising a first and a second strand, wherein the first strand comprises at least 15 contiguous nt differing by 0, 1, 2, or 3 nt from a first strand of: AD-39773.1 (SEQ ID NO: 639), or a modified or unmodified variant thereof.

[0573] A RNAi agent comprising a first and a second strand, wherein the first strand comprises at least 15 contiguous nt differing by 0, 1, 2, or 3 nt from a first strand of: AD-39732.1 (SEQ ID NO: 640), or a modified or unmodified variant thereof.

[0574] A RNAi agent comprising a first and a second strand, wherein the first strand comprises at least 15 contiguous nt differing by 0, 1, 2, or 3 nt from a first strand of: AD-39738.1 (SEQ ID NO: 641), or a modified or unmodified variant thereof.

[0575] A RNAi agent comprising a first and a second strand, wherein the first strand comprises at least 15 contiguous nt differing by 0, 1, 2, or 3 nt from a first strand of: AD-39744.1 (SEQ ID NO: 642), or a modified or unmodified variant thereof.

[0576] A RNAi agent comprising a first and a second strand, wherein the first strand comprises at least 15 contiguous nt differing by 0, 1, 2, or 3 nt from a first strand of: AD-39750.1 (SEQ ID NO: 643), or a modified or unmodified variant thereof.

[0577] A RNAi agent comprising a first and a second strand, wherein the first strand comprises at least 15 contiguous nt differing by 0, 1, 2, or 3 nt from a first strand of: AD-39756.1 (SEQ ID NO: 644), or a modified or unmodified variant thereof.

[0578] A RNAi agent comprising a first and a second strand, wherein the first strand comprises at least 15 contiguous nt differing by 0, 1, 2, or 3 nt from a first strand of: AD-39762.1 (SEQ ID NO: 645), or a modified or unmodified variant thereof.

[0579] A RNAi agent comprising a first and a second strand, wherein the first strand comprises at least 15 contiguous nt differing by 0, 1, 2, or 3 nt from a first strand of: AD-39768.1 (SEQ ID NO: 646), or a modified or unmodified variant thereof.

[0580] A RNAi agent comprising a first and a second strand, wherein the first strand comprises at least 15 contiguous nt differing by 0, 1, 2, or 3 nt from a first strand of: AD-39774.1 (SEQ ID NO: 647), or a modified or unmodified variant thereof.

[0581] A RNAi agent comprising a first and a second strand, wherein the first strand comprises at least 15 contiguous nt differing by 0, 1, 2, or 3 nt from a first strand of: AD-39733.1 (SEQ ID NO: 648), or a modified or unmodified variant thereof.

[0582] A RNAi agent comprising a first and a second strand, wherein the first strand comprises at least 15 contiguous nt differing by 0, 1, 2, or 3 nt from a first strand of: AD-39739.1 (SEQ ID NO: 649), or a modified or unmodified variant thereof.

[0583] A RNAi agent comprising a first and a second strand, wherein the first strand comprises at least 15 contiguous nt differing by 0, 1, 2, or 3 nt from a first strand of: AD-39745.1 (SEQ ID NO: 650), or a modified or unmodified variant thereof.

[0584] A RNAi agent comprising a first and a second strand, wherein the first strand comprises at least 15 contiguous nt differing by 0, 1, 2, or 3 nt from a first strand of: AD-39751.1 (SEQ ID NO: 651), or a modified or unmodified variant thereof.

[0585] A RNAi agent comprising a first and a second strand, wherein the first strand comprises at least 15 contiguous nt differing by 0, 1, 2, or 3 nt from a first strand of: AD-39757.1 (SEQ ID NO: 652), or a modified or unmodified variant thereof.

[0586] A RNAi agent comprising a first and a second strand, wherein the first strand comprises at least 15 contiguous nt differing by 0, 1, 2, or 3 nt from a first strand of: AD-39763.1 (SEQ ID NO: 653), or a modified or unmodified variant thereof.

[0587] A RNAi agent comprising a first and a second strand, wherein the first strand comprises at least 15 contiguous nt differing by 0, 1, 2, or 3 nt from a first strand of: AD-39769.1 (SEQ ID NO: 654), or a modified or unmodified variant thereof.

[0588] A RNAi agent comprising a first and a second strand, wherein the first strand comprises at least 15 contiguous nt differing by 0, 1, 2, or 3 nt from a first strand of: AD-39775.1 (SEQ ID NO: 655), or a modified or unmodified variant thereof.

[0589] A RNAi agent comprising a first and a second strand, wherein the first strand comprises at least 15 contiguous nt differing by 0, 1, 2, or 3 nt from a first strand of: AD-39734.1 (SEQ ID NO: 656), or a modified or unmodified variant thereof.

[0590] A RNAi agent comprising a first and a second strand, wherein the first strand comprises at least 15 contiguous nt differing by 0, 1, 2, or 3 nt from a first strand of: AD-39740.1 (SEQ ID NO: 657), or a modified or unmodified variant thereof.

[0591] A RNAi agent comprising a first and a second strand, wherein the first strand comprises at least 15 contiguous nt differing by 0, 1, 2, or 3 nt from a first strand of: AD-39746.1 (SEQ ID NO: 658), or a modified or unmodified variant thereof.

[0592] A RNAi agent comprising a first and a second strand, wherein the first strand comprises at least 15 contiguous nt differing by 0, 1, 2, or 3 nt from a first strand of: AD-39752.1 (SEQ ID NO: 659), or a modified or unmodified variant thereof.

[0593] A RNAi agent comprising a first and a second strand, wherein the first strand comprises at least 15 contiguous nt differing by 0, 1, 2, or 3 nt from a first strand of: AD-39758.1 (SEQ ID NO: 660), or a modified or unmodified variant thereof.

[0594] A RNAi agent comprising a first and a second strand, wherein the first strand comprises at least 15 contiguous nt differing by 0, 1, 2, or 3 nt from a first strand of: AD-39764.1 (SEQ ID NO: 661), or a modified or unmodified variant thereof.

[0595] A RNAi agent comprising a first and a second strand, wherein the first strand comprises at least 15 contiguous nt differing by 0, 1, 2, or 3 nt from a first strand of: AD-39770.1 (SEQ ID NO: 662), or a modified or unmodified variant thereof.

[0596] A RNAi agent comprising a first and a second strand, wherein the first strand comprises at least 15 contiguous nt differing by 0, 1, 2, or 3 nt from a first strand of: AD-39776.1 (SEQ ID NO: 663), or a modified or unmodified variant thereof.

[0597] A RNAi agent comprising a first and a second strand, wherein the first strand comprises at least 15 contiguous nt differing by 0, 1, 2, or 3 nt from a first strand of: AD-39735.1 (SEQ ID NO: 664), or a modified or unmodified variant thereof.

[0598] A RNAi agent comprising a first and a second strand, wherein the first strand comprises at least 15 contiguous nt differing by 0, 1, 2, or 3 nt from a first strand of: AD-39741.1 (SEQ ID NO: 665), or a modified or unmodified variant thereof.

[0599] A RNAi agent comprising a first and a second strand, wherein the first strand comprises at least 15 contiguous nt differing by 0, 1, 2, or 3 nt from a first strand of: AD-39747.1 (SEQ ID NO: 666), or a modified or unmodified variant thereof.

[0600] A RNAi agent comprising a first and a second strand, wherein the first strand comprises at least 15 contiguous nt differing by 0, 1, 2, or 3 nt from a first strand of: AD-39753.1 (SEQ ID NO: 667), or a modified or unmodified variant thereof.

[0601] A RNAi agent comprising a first and a second strand, wherein the first strand comprises at least 15 contiguous nt differing by 0, 1, 2, or 3 nt from a first strand of: AD-39759.1 (SEQ ID NO: 668), or a modified or unmodified variant thereof.

[0602] A RNAi agent comprising a first and a second strand, wherein the first strand comprises at least 15 contiguous nt differing by 0, 1, 2, or 3 nt from a first strand of: AD-39765.1 (SEQ ID NO: 669), or a modified or unmodified variant thereof.

[0603] A RNAi agent comprising a first and a second strand, wherein the first strand comprises at least 15 contiguous nt differing by 0, 1, 2, or 3 nt from a first strand of: AD-39771.1 (SEQ ID NO: 670), or a modified or unmodified variant thereof.

[0604] A RNAi agent comprising a first and a second strand, wherein the first strand comprises at least 15 contiguous nt differing by 0, 1, 2, or 3 nt from a first strand of: AD-39778.1 (SEQ ID NO: 671), or a modified or unmodified variant thereof.

[0605] A RNAi agent comprising a first and a second strand, wherein the first strand comprises at least 15 contiguous nt differing by 0, 1, 2, or 3 nt from a first strand of: AD-39784.1 (SEQ ID NO: 672), or a modified or unmodified variant thereof.

[0606] A RNAi agent comprising a first and a second strand, wherein the first strand comprises at least 15 contiguous nt differing by 0, 1, 2, or 3 nt from a first strand of: AD-39790.1 (SEQ ID NO: 673), or a modified or unmodified variant thereof.

[0607] A RNAi agent comprising a first and a second strand, wherein the first strand comprises at least 15 contiguous nt differing by 0, 1, 2, or 3 nt from a first strand of: AD-39796.1 (SEQ ID NO: 674), or a modified or unmodified variant thereof.

[0608] A RNAi agent comprising a first and a second strand, wherein the first strand comprises at least 15 contiguous nt differing by 0, 1, 2, or 3 nt from a first strand of: AD-39802.1 (SEQ ID NO: 675), or a modified or unmodified variant thereof.

[0609] A RNAi agent comprising a first and a second strand, wherein the first strand comprises at least 15 contiguous nt differing by 0, 1, 2, or 3 nt from a first strand of: AD-39808.1 (SEQ ID NO: 676), or a modified or unmodified variant thereof.

[0610] A RNAi agent comprising a first and a second strand, wherein the first strand comprises at least 15 contiguous nt differing by 0, 1, 2, or 3 nt from a first strand of: AD-39814.1 (SEQ ID NO: 677), or a modified or unmodified variant thereof.

[0611] A RNAi agent comprising a first and a second strand, wherein the first strand comprises at least 15 contiguous nt differing by 0, 1, 2, or 3 nt from a first strand of: AD-39820.1 (SEQ ID NO: 678), or a modified or unmodified variant thereof.

[0612] A RNAi agent comprising a first and a second strand, wherein the first strand comprises at least 15 contiguous nt differing by 0, 1, 2, or 3 nt from a first strand of: AD-39779.1 (SEQ ID NO: 679), or a modified or unmodified variant thereof.

[0613] A RNAi agent comprising a first and a second strand, wherein the first strand comprises at least 15 contiguous nt differing by 0, 1, 2, or 3 nt from a first strand of: AD-39785.1 (SEQ ID NO: 680), or a modified or unmodified variant thereof.

[0614] A RNAi agent comprising a first and a second strand, wherein the first strand comprises at least 15 contiguous nt differing by 0, 1, 2, or 3 nt from a first strand of: AD-39791.1 (SEQ ID NO: 681), or a modified or unmodified variant thereof.

[0615] A RNAi agent comprising a first and a second strand, wherein the first strand comprises at least 15 contiguous nt differing by 0, 1, 2, or 3 nt from a first strand of: AD-39797.1 (SEQ ID NO: 682), or a modified or unmodified variant thereof.

[0616] A RNAi agent comprising a first and a second strand, wherein the first strand comprises at least 15 contiguous nt differing by 0, 1, 2, or 3 nt from a first strand of: AD-39803.1 (SEQ ID NO: 683), or a modified or unmodified variant thereof.

[0617] A RNAi agent comprising a first and a second strand, wherein the first strand comprises at least 15 contiguous nt differing by 0, 1, 2, or 3 nt from a first strand of: AD-39809.1 (SEQ ID NO: 684), or a modified or unmodified variant thereof.

[0618] A RNAi agent comprising a first and a second strand, wherein the first strand comprises at least 15 contiguous nt differing by 0, 1, 2, or 3 nt from a first strand of: AD-39815.1 (SEQ ID NO: 685), or a modified or unmodified variant thereof.

[0619] A RNAi agent comprising a first and a second strand, wherein the first strand comprises at least 15 contiguous nt differing by 0, 1, 2, or 3 nt from a first strand of: AD-39821.1 (SEQ ID NO: 686), or a modified or unmodified variant thereof.

[0620] A RNAi agent comprising a first and a second strand, wherein the first strand comprises at least 15 contiguous nt differing by 0, 1, 2, or 3 nt from a first strand of: AD-39780.1 (SEQ ID NO: 687), or a modified or unmodified variant thereof.

[0621] A RNAi agent comprising a first and a second strand, wherein the first strand comprises at least 15 contiguous nt differing by 0, 1, 2, or 3 nt from a first strand of: AD-39786.1 (SEQ ID NO: 688), or a modified or unmodified variant thereof.

[0622] A RNAi agent comprising a first and a second strand, wherein the first strand comprises at least 15 contiguous nt differing by 0, 1, 2, or 3 nt from a first strand of: AD-39792.1 (SEQ ID NO: 689), or a modified or unmodified variant thereof.

[0623] A RNAi agent comprising a first and a second strand, wherein the first strand comprises at least 15 contiguous nt differing by 0, 1, 2, or 3 nt from a first strand of: AD-39798.1 (SEQ ID NO: 690), or a modified or unmodified variant thereof.

[0624] A RNAi agent comprising a first and a second strand, wherein the first strand comprises at least 15 contiguous nt differing by 0, 1, 2, or 3 nt from a first strand of: AD-39804.1 (SEQ ID NO: 691), or a modified or unmodified variant thereof.

[0625] A RNAi agent comprising a first and a second strand, wherein the first strand comprises at least 15 contiguous nt differing by 0, 1, 2, or 3 nt from a first strand of: AD-39810.1 (SEQ ID NO: 692), or a modified or unmodified variant thereof.

[0626] A RNAi agent comprising a first and a second strand, wherein the first strand comprises at least 15 contiguous nt differing by 0, 1, 2, or 3 nt from a first strand of: AD-39816.1 (SEQ ID NO: 693), or a modified or unmodified variant thereof.

[0627] A RNAi agent comprising a first and a second strand, wherein the first strand comprises at least 15 contiguous nt differing by 0, 1, 2, or 3 nt from a first strand of: AD-39822.1 (SEQ ID NO: 694), or a modified or unmodified variant thereof.

[0628] A RNAi agent comprising a first and a second strand, wherein the first strand comprises at least 15 contiguous nt differing by 0, 1, 2, or 3 nt from a first strand of: AD-39781.1 (SEQ ID NO: 695), or a modified or unmodified variant thereof.

[0629] A RNAi agent comprising a first and a second strand, wherein the first strand comprises at least 15 contiguous nt differing by 0, 1, 2, or 3 nt from a first strand of: AD-39787.1 (SEQ ID NO: 696), or a modified or unmodified variant thereof.

[0630] A RNAi agent comprising a first and a second strand, wherein the first strand comprises at least 15 contiguous nt differing by 0, 1, 2, or 3 nt from a first strand of: AD-39793.1 (SEQ ID NO: 697), or a modified or unmodified variant thereof.

[0631] A RNAi agent comprising a first and a second strand, wherein the first strand comprises at least 15 contiguous nt differing by 0, 1, 2, or 3 nt from a first strand of: AD-39799.1 (SEQ ID NO: 698), or a modified or unmodified variant thereof.

[0632] A RNAi agent comprising a first and a second strand, wherein the first strand comprises at least 15 contiguous nt differing by 0, 1, 2, or 3 nt from a first strand of: AD-39805.1 (SEQ ID NO: 699), or a modified or unmodified variant thereof.

[0633] A RNAi agent comprising a first and a second strand, wherein the first strand comprises at least 15 contiguous nt differing by 0, 1, 2, or 3 nt from a first strand of: AD-39811.1 (SEQ ID NO: 700), or a modified or unmodified variant thereof.

[0634] A RNAi agent comprising a first and a second strand, wherein the first strand comprises at least 15 contiguous nt differing by 0, 1, 2, or 3 nt from a first strand of: AD-39817.1 (SEQ ID NO: 701), or a modified or unmodified variant thereof.

[0635] A RNAi agent comprising a first and a second strand, wherein the first strand comprises at least 15 contiguous nt differing by 0, 1, 2, or 3 nt from a first strand of: AD-39823.1 (SEQ ID NO: 702), or a modified or unmodified variant thereof.

[0636] A RNAi agent comprising a first and a second strand, wherein the first strand comprises at least 15 contiguous nt differing by 0, 1, 2, or 3 nt from a first strand of: AD-39782.1 (SEQ ID NO: 703), or a modified or unmodified variant thereof.

[0637] A RNAi agent comprising a first and a second strand, wherein the first strand comprises at least 15 contiguous nt differing by 0, 1, 2, or 3 nt from a first strand of: AD-39788.1 (SEQ ID NO: 704), or a modified or unmodified variant thereof.

[0638] A RNAi agent comprising a first and a second strand, wherein the first strand comprises at least 15 contiguous nt differing by 0, 1, 2, or 3 nt from a first strand of: AD-39794.1 (SEQ ID NO: 705), or a modified or unmodified variant thereof.

[0639] A RNAi agent comprising a first and a second strand, wherein the first strand comprises at least 15 contiguous nt differing by 0, 1, 2, or 3 nt from a first strand of: AD-39800.1 (SEQ ID NO: 706), or a modified or unmodified variant thereof.

[0640] A RNAi agent comprising a first and a second strand, wherein the first strand comprises at least 15 contiguous nt differing by 0, 1, 2, or 3 nt from a first strand of: AD-39806.1 (SEQ ID NO: 707), or a modified or unmodified variant thereof.

[0641] A RNAi agent comprising a first and a second strand, wherein the first strand comprises at least 15 contiguous nt differing by 0, 1, 2, or 3 nt from a first strand of: AD-39812.1 (SEQ ID NO: 708), or a modified or unmodified variant thereof.

[0642] A RNAi agent comprising a first and a second strand, wherein the first strand comprises at least 15 contiguous nt differing by 0, 1, 2, or 3 nt from a first strand of: AD-39818.1 (SEQ ID NO: 709), or a modified or unmodified variant thereof.

[0643] A RNAi agent comprising a first and a second strand, wherein the first strand comprises at least 15 contiguous nt differing by 0, 1, 2, or 3 nt from a first strand of: AD-39824.1 (SEQ ID NO: 710), or a modified or unmodified variant thereof.

[0644] A RNAi agent comprising a first and a second strand, wherein the first strand comprises at least 15 contiguous nt differing by 0, 1, 2, or 3 nt from a first strand of: AD-39783.1 (SEQ ID NO: 711), or a modified or unmodified variant thereof.

[0645] A RNAi agent comprising a first and a second strand, wherein the first strand comprises at least 15 contiguous nt differing by 0, 1, 2, or 3 nt from a first strand of: AD-39789.1 (SEQ ID NO: 712), or a modified or unmodified variant thereof.

[0646] A RNAi agent comprising a first and a second strand, wherein the first strand comprises at least 15 contiguous nt differing by 0, 1, 2, or 3 nt from a first strand of: AD-39795.1 (SEQ ID NO: 713), or a modified or unmodified variant thereof.

[0647] A RNAi agent comprising a first and a second strand, wherein the first strand comprises at least 15 contiguous nt differing by 0, 1, 2, or 3 nt from a first strand of: AD-39801.1 (SEQ ID NO: 714), or a modified or unmodified variant thereof.

[0648] A RNAi agent comprising a first and a second strand, wherein the first strand comprises at least 15 contiguous nt differing by 0, 1, 2, or 3 nt from a first strand of: AD-39807.1 (SEQ ID NO: 715), or a modified or unmodified variant thereof.

[0649] A RNAi agent comprising a first and a second strand, wherein the first strand comprises at least 15 contiguous nt differing by 0, 1, 2, or 3 nt from a first strand of: AD-39813.1 (SEQ ID NO: 716), or a modified or unmodified variant thereof.

[0650] A RNAi agent comprising a first and a second strand, wherein the first strand comprises at least 15 contiguous nt differing by 0, 1, 2, or 3 nt from a first strand of: AD-39819.1 (SEQ ID NO: 717), or a modified or unmodified variant thereof.

[0651] A RNAi agent comprising a first and a second strand, wherein the first strand comprises at least 15 contiguous nt differing by 0, 1, 2, or 3 nt from a first strand of: AD-39825.1 (SEQ ID NO: 718), or a modified or unmodified variant thereof.

[0652] A RNAi agent comprising a first and a second strand, wherein the first strand comprises at least 15 contiguous nt differing by 0, 1, 2, or 3 nt from a first strand of: AD-39831.1 (SEQ ID NO: 719), or a modified or unmodified variant thereof.

[0653] A RNAi agent comprising a first and a second strand, wherein the first strand comprises at least 15 contiguous nt differing by 0, 1, 2, or 3 nt from a first strand of: AD-39837.1 (SEQ ID NO: 720), or a modified or unmodified variant thereof.

[0654] A RNAi agent comprising a first and a second strand, wherein the first strand comprises at least 15 contiguous nt differing by 0, 1, 2, or 3 nt from a first strand of: AD-39843.1 (SEQ ID NO: 721), or a modified or unmodified variant thereof.

[0655] A RNAi agent comprising a first and a second strand, wherein the first strand comprises at least 15 contiguous nt differing by 0, 1, 2, or 3 nt from a first strand of: AD-39849.1 (SEQ ID NO: 722), or a modified or unmodified variant thereof.

[0656] A RNAi agent comprising a first and a second strand, wherein the first strand comprises at least 15 contiguous nt differing by 0, 1, 2, or 3 nt from a first strand of: AD-39855.1 (SEQ ID NO: 723), or a modified or unmodified variant thereof.

[0657] A RNAi agent comprising a first and a second strand, wherein the first strand comprises at least 15 contiguous nt differing by 0, 1, 2, or 3 nt from a first strand of: AD-39861.1 (SEQ ID NO: 724), or a modified or unmodified variant thereof.

[0658] A RNAi agent comprising a first and a second strand, wherein the first strand comprises at least 15 contiguous nt differing by 0, 1, 2, or 3 nt from a first strand of: AD-39867.1 (SEQ ID NO: 725), or a modified or unmodified variant thereof.

[0659] A RNAi agent comprising a first and a second strand, wherein the first strand comprises at least 15 contiguous nt differing by 0, 1, 2, or 3 nt from a first strand of: AD-39826.1 (SEQ ID NO: 726), or a modified or unmodified variant thereof.

[0660] A RNAi agent comprising a first and a second strand, wherein the first strand comprises at least 15 contiguous nt differing by 0, 1, 2, or 3 nt from a first strand of: AD-39832.1 (SEQ ID NO: 727), or a modified or unmodified variant thereof.

[0661] A RNAi agent comprising a first and a second strand, wherein the first strand comprises at least 15 contiguous nt differing by 0, 1, 2, or 3 nt from a first strand of: AD-39838.1 (SEQ ID NO: 728), or a modified or unmodified variant thereof.

[0662] A RNAi agent comprising a first and a second strand, wherein the first strand comprises at least 15 contiguous nt differing by 0, 1, 2, or 3 nt from a first strand of: AD-39844.1 (SEQ ID NO: 729), or a modified or unmodified variant thereof.

[0663] A RNAi agent comprising a first and a second strand, wherein the first strand comprises at least 15 contiguous nt differing by 0, 1, 2, or 3 nt from a first strand of: AD-39850.1 (SEQ ID NO: 730), or a modified or unmodified variant thereof.

[0664] A RNAi agent comprising a first and a second strand, wherein the first strand comprises at least 15 contiguous nt differing by 0, 1, 2, or 3 nt from a first strand of: AD-39856.1 (SEQ ID NO: 731), or a modified or unmodified variant thereof.

[0665] A RNAi agent comprising a first and a second strand, wherein the first strand comprises at least 15 contiguous nt differing by 0, 1, 2, or 3 nt from a first strand of: AD-39862.1 (SEQ ID NO: 732), or a modified or unmodified variant thereof.

[0666] A RNAi agent comprising a first and a second strand, wherein the first strand comprises at least 15 contiguous nt differing by 0, 1, 2, or 3 nt from a first strand of: AD-39868.1 (SEQ ID NO: 733), or a modified or unmodified variant thereof.

[0667] A RNAi agent comprising a first and a second strand, wherein the first strand comprises at least 15 contiguous nt differing by 0, 1, 2, or 3 nt from a first strand of: AD-39827.1 (SEQ ID NO: 734), or a modified or unmodified variant thereof.

[0668] A RNAi agent comprising a first and a second strand, wherein the first strand comprises at least 15 contiguous nt differing by 0, 1, 2, or 3 nt from a first strand of: AD-39833.1 (SEQ ID NO: 735), or a modified or unmodified variant thereof.

[0669] A RNAi agent comprising a first and a second strand, wherein the first strand comprises at least 15 contiguous nt differing by 0, 1, 2, or 3 nt from a first strand of: AD-39839.1 (SEQ ID NO: 736), or a modified or unmodified variant thereof.

[0670] A RNAi agent comprising a first and a second strand, wherein the first strand comprises at least 15 contiguous nt differing by 0, 1, 2, or 3 nt from a first strand of: AD-39845.1 (SEQ ID NO: 737), or a modified or unmodified variant thereof.

[0671] A RNAi agent comprising a first and a second strand, wherein the first strand comprises at least 15 contiguous nt differing by 0, 1, 2, or 3 nt from a first strand of: AD-39851.1 (SEQ ID NO: 738), or a modified or unmodified variant thereof.

[0672] A RNAi agent comprising a first and a second strand, wherein the first strand comprises at least 15 contiguous nt differing by 0, 1, 2, or 3 nt from a first strand of: AD-39857.1 (SEQ ID NO: 739), or a modified or unmodified variant thereof.

[0673] A RNAi agent comprising a first and a second strand, wherein the first strand comprises at least 15 contiguous nt differing by 0, 1, 2, or 3 nt from a first strand of: AD-39863.1 (SEQ ID NO: 740), or a modified or unmodified variant thereof.

[0674] A RNAi agent comprising a first and a second strand, wherein the first strand comprises at least 15 contiguous nt differing by 0, 1, 2, or 3 nt from a first strand of: AD-39869.1 (SEQ ID NO: 741), or a modified or unmodified variant thereof.

[0675] A RNAi agent comprising a first and a second strand, wherein the first strand comprises at least 15 contiguous nt differing by 0, 1, 2, or 3 nt from a first strand of: AD-39828.1 (SEQ ID NO: 742), or a modified or unmodified variant thereof.

[0676] A RNAi agent comprising a first and a second strand, wherein the first strand comprises at least 15 contiguous nt differing by 0, 1, 2, or 3 nt from a first strand of: AD-39834.1 (SEQ ID NO: 743), or a modified or unmodified variant thereof.

[0677] A RNAi agent comprising a first and a second strand, wherein the first strand comprises at least 15 contiguous nt differing by 0, 1, 2, or 3 nt from a first strand of: AD-39840.1 (SEQ ID NO: 744), or a modified or unmodified variant thereof.

[0678] A RNAi agent comprising a first and a second strand, wherein the first strand comprises at least 15 contiguous nt differing by 0, 1, 2, or 3 nt from a first strand of: AD-39846.1 (SEQ ID NO: 745), or a modified or unmodified variant thereof.

[0679] A RNAi agent comprising a first and a second strand, wherein the first strand comprises at least 15 contiguous nt differing by 0, 1, 2, or 3 nt from a first strand of: AD-39852.1 (SEQ ID NO: 746), or a modified or unmodified variant thereof.

[0680] A RNAi agent comprising a first and a second strand, wherein the first strand comprises at least 15 contiguous nt differing by 0, 1, 2, or 3 nt from a first strand of: AD-39858.1 (SEQ ID NO: 747), or a modified or unmodified variant thereof.

[0681] A RNAi agent comprising a first and a second strand, wherein the first strand comprises at least 15 contiguous nt differing by 0, 1, 2, or 3 nt from a first strand of: AD-39864.1 (SEQ ID NO: 748), or a modified or unmodified variant thereof.

[0682] A RNAi agent comprising a first and a second strand, wherein the first strand comprises at least 15 contiguous nt differing by 0, 1, 2, or 3 nt from a first strand of: AD-39870.1 (SEQ ID NO: 749), or a modified or unmodified variant thereof.

[0683] A RNAi agent comprising a first and a second strand, wherein the first strand comprises at least 15 contiguous nt differing by 0, 1, 2, or 3 nt from a first strand of: AD-39829.1 (SEQ ID NO: 750), or a modified or unmodified variant thereof.

[0684] A RNAi agent comprising a first and a second strand, wherein the first strand comprises at least 15 contiguous nt differing by 0, 1, 2, or 3 nt from a first strand of: AD-39835.1 (SEQ ID NO: 751), or a modified or unmodified variant thereof.

[0685] A RNAi agent comprising a first and a second strand, wherein the first strand comprises at least 15 contiguous nt differing by 0, 1, 2, or 3 nt from a first strand of: AD-39841.1 (SEQ ID NO: 752), or a modified or unmodified variant thereof.

[0686] A RNAi agent comprising a first and a second strand, wherein the first strand comprises at least 15 contiguous nt differing by 0, 1, 2, or 3 nt from a first strand of: AD-39853.1 (SEQ ID NO: 753), or a modified or unmodified variant thereof.

[0687] A RNAi agent comprising a first and a second strand, wherein the first strand comprises at least 15 contiguous nt differing by 0, 1, 2, or 3 nt from a first strand of: AD-39859.1 (SEQ ID NO: 754), or a modified or unmodified variant thereof.

[0688] A RNAi agent comprising a first and a second strand, wherein the first strand comprises at least 15 contiguous nt differing by 0, 1, 2, or 3 nt from a first strand of: AD-39865.1 (SEQ ID NO: 755), or a modified or unmodified variant thereof.

[0689] A RNAi agent comprising a first and a second strand, wherein the first strand comprises at least 15 contiguous nt differing by 0, 1, 2, or 3 nt from a first strand of: AD-39871.1 (SEQ ID NO: 756), or a modified or unmodified variant thereof.

[0690] A RNAi agent comprising a first and a second strand, wherein the first strand comprises at least 15 contiguous nt differing by 0, 1, 2, or 3 nt from a first strand of: AD-39830.1 (SEQ ID NO: 757), or a modified or unmodified variant thereof.

[0691] A RNAi agent comprising a first and a second strand, wherein the first strand comprises at least 15 contiguous nt differing by 0, 1, 2, or 3 nt from a first strand of: AD-39836.1 (SEQ ID NO: 758), or a modified or unmodified variant thereof.

[0692] A RNAi agent comprising a first and a second strand, wherein the first strand comprises at least 15 contiguous nt differing by 0, 1, 2, or 3 nt from a first strand of: AD-39842.1 (SEQ ID NO: 759), or a modified or unmodified variant thereof.

[0693] A RNAi agent comprising a first and a second strand, wherein the first strand comprises at least 15 contiguous nt differing by 0, 1, 2, or 3 nt from a first strand of: AD-39848.1 (SEQ ID NO: 760), or a modified or unmodified variant thereof.

[0694] A RNAi agent comprising a first and a second strand, wherein the first strand comprises at least 15 contiguous nt differing by 0, 1, 2, or 3 nt from a first strand of: AD-39854.1 (SEQ ID NO: 761), or a modified or unmodified variant thereof.

[0695] A RNAi agent comprising a first and a second strand, wherein the first strand comprises at least 15 contiguous nt differing by 0, 1, 2, or 3 nt from a first strand of: AD-39860.1 (SEQ ID NO: 762), or a modified or unmodified variant thereof.

[0696] A RNAi agent comprising a first and a second strand, wherein the first strand comprises at least 15 contiguous nt differing by 0, 1, 2, or 3 nt from a first strand of: AD-39866.1 (SEQ ID NO: 763), or a modified or unmodified variant thereof.

[0697] A RNAi agent comprising a first and a second strand, wherein the first strand comprises at least 15 contiguous nt differing by 0, 1, 2, or 3 nt from a first strand of: AD-39992.1 (SEQ ID NO: 764), or a modified or unmodified variant thereof.

[0698] A RNAi agent comprising a first and a second strand, wherein the first strand comprises at least 15 contiguous nt differing by 0, 1, 2, or 3 nt from a first strand of: AD-39998.1 (SEQ ID NO: 765), or a modified or unmodified variant thereof.

[0699] A RNAi agent comprising a first and a second strand, wherein the first strand comprises at least 15 contiguous nt differing by 0, 1, 2, or 3 nt from a first strand of: AD-40004.1 (SEQ ID NO: 766), or a modified or unmodified variant thereof.

[0700] A RNAi agent comprising a first and a second strand, wherein the first strand comprises at least 15 contiguous nt differing by 0, 1, 2, or 3 nt from a first strand of: AD-40010.1 (SEQ ID NO: 767), or a modified or unmodified variant thereof.

[0701] A RNAi agent comprising a first and a second strand, wherein the first strand comprises at least 15 contiguous nt differing by 0, 1, 2, or 3 nt from a first strand of: AD-40016.1 (SEQ ID NO: 768), or a modified or unmodified variant thereof.

[0702] A RNAi agent comprising a first and a second strand, wherein the first strand comprises at least 15 contiguous nt differing by 0, 1, 2, or 3 nt from a first strand of: AD-40022.1 (SEQ ID NO: 769), or a modified or unmodified variant thereof.

[0703] A RNAi agent comprising a first and a second strand, wherein the first strand comprises at least 15 contiguous nt differing by 0, 1, 2, or 3 nt from a first strand of: AD-40028.1 (SEQ ID NO: 770), or a modified or unmodified variant thereof.

[0704] A RNAi agent comprising a first and a second strand, wherein the first strand comprises at least 15 contiguous nt differing by 0, 1, 2, or 3 nt from a first strand of: AD-40034.1 (SEQ ID NO: 771), or a modified or unmodified variant thereof.

[0705] A RNAi agent comprising a first and a second strand, wherein the first strand comprises at least 15 contiguous nt differing by 0, 1, 2, or 3 nt from a first strand of: AD-39999.1 (SEQ ID NO: 772), or a modified or unmodified variant thereof.

[0706] A RNAi agent comprising a first and a second strand, wherein the first strand comprises at least 15 contiguous nt differing by 0, 1, 2, or 3 nt from a first strand of: AD-40005.1 (SEQ ID NO: 773), or a modified or unmodified variant thereof.

[0707] A RNAi agent comprising a first and a second strand, wherein the first strand comprises at least 15 contiguous nt differing by 0, 1, 2, or 3 nt from a first strand of: AD-40011.1 (SEQ ID NO: 774), or a modified or unmodified variant thereof.

[0708] A RNAi agent comprising a first and a second strand, wherein the first strand comprises at least 15 contiguous nt differing by 0, 1, 2, or 3 nt from a first strand of: AD-40017.1 (SEQ ID NO: 775), or a modified or unmodified variant thereof.

[0709] A RNAi agent comprising a first and a second strand, wherein the first strand comprises at least 15 contiguous nt differing by 0, 1, 2, or 3 nt from a first strand of: AD-40029.1 (SEQ ID NO: 776), or a modified or unmodified variant thereof.

[0710] A RNAi agent comprising a first and a second strand, wherein the first strand comprises at least 15 contiguous nt differing by 0, 1, 2, or 3 nt from a first strand of: AD-40035.1 (SEQ ID NO: 777), or a modified or unmodified variant thereof.

[0711] A RNAi agent comprising a first and a second strand, wherein the first strand comprises at least 15 contiguous nt differing by 0, 1, 2, or 3 nt from a first strand of: AD-39994.1 (SEQ ID NO: 778), or a modified or unmodified variant thereof.

[0712] A RNAi agent comprising a first and a second strand, wherein the first strand comprises at least 15 contiguous nt differing by 0, 1, 2, or 3 nt from a first strand of: AD-40000.1 (SEQ ID NO: 779), or a modified or unmodified variant thereof.

[0713] A RNAi agent comprising a first and a second strand, wherein the first strand comprises at least 15 contiguous nt differing by 0, 1, 2, or 3 nt from a first strand of: AD-40006.1 (SEQ ID NO: 780), or a modified or unmodified variant thereof.

[0714] A RNAi agent comprising a first and a second strand, wherein the first strand comprises at least 15 contiguous nt differing by 0, 1, 2, or 3 nt from a first strand of: AD-40012.1 (SEQ ID NO: 781), or a modified or unmodified variant thereof.

[0715] A RNAi agent comprising a first and a second strand, wherein the first strand comprises at least 15 contiguous nt differing by 0, 1, 2, or 3 nt from a first strand of: AD-40018.1 (SEQ ID NO: 782), or a modified or unmodified variant thereof.

[0716] A RNAi agent comprising a first and a second strand, wherein the first strand comprises at least 15 contiguous nt differing by 0, 1, 2, or 3 nt from a first strand of: AD-40024.1 (SEQ ID NO: 783), or a modified or unmodified variant thereof.

[0717] A RNAi agent comprising a first and a second strand, wherein the first strand comprises at least 15 contiguous nt differing by 0, 1, 2, or 3 nt from a first strand of: AD-40030.1 (SEQ ID NO: 784), or a modified or unmodified variant thereof.

[0718] A RNAi agent comprising a first and a second strand, wherein the first strand comprises at least 15 contiguous nt differing by 0, 1, 2, or 3 nt from a first strand of: AD-40036.1 (SEQ ID NO: 785), or a modified or unmodified variant thereof.

[0719] A RNAi agent comprising a first and a second strand, wherein the first strand comprises at least 15 contiguous nt differing by 0, 1, 2, or 3 nt from a first strand of: AD-39995.1 (SEQ ID NO: 786), or a modified or unmodified variant thereof.

[0720] A RNAi agent comprising a first and a second strand, wherein the first strand comprises at least 15 contiguous nt differing by 0, 1, 2, or 3 nt from a first strand of: AD-40001.1 (SEQ ID NO: 787), or a modified or unmodified variant thereof.

[0721] A RNAi agent comprising a first and a second strand, wherein the first strand comprises at least 15 contiguous nt differing by 0, 1, 2, or 3 nt from a first strand of: AD-40007.1 (SEQ ID NO: 788), or a modified or unmodified variant thereof.

[0722] A RNAi agent comprising a first and a second strand, wherein the first strand comprises at least 15 contiguous nt differing by 0, 1, 2, or 3 nt from a first strand of: AD-40013.1 (SEQ ID NO: 789), or a modified or unmodified variant thereof.

[0723] A RNAi agent comprising a first and a second strand, wherein the first strand comprises at least 15 contiguous nt differing by 0, 1, 2, or 3 nt from a first strand of: AD-40019.1 (SEQ ID NO: 790), or a modified or unmodified variant thereof.

[0724] A RNAi agent comprising a first and a second strand, wherein the first strand comprises at least 15 contiguous nt differing by 0, 1, 2, or 3 nt from a first strand of: AD-40025.1 (SEQ ID NO: 791), or a modified or unmodified variant thereof.

[0725] A RNAi agent comprising a first and a second strand, wherein the first strand comprises at least 15 contiguous nt differing by 0, 1, 2, or 3 nt from a first strand of: AD-40031.1 (SEQ ID NO: 792), or a modified or unmodified variant thereof.

[0726] A RNAi agent comprising a first and a second strand, wherein the first strand comprises at least 15 contiguous nt differing by 0, 1, 2, or 3 nt from a first strand of: AD-40037.1 (SEQ ID NO: 793), or a modified or unmodified variant thereof.

[0727] A RNAi agent comprising a first and a second strand, wherein the first strand comprises at least 15 contiguous nt differing by 0, 1, 2, or 3 nt from a first strand of: AD-39996.1 (SEQ ID NO: 794), or a modified or unmodified variant thereof.

[0728] A RNAi agent comprising a first and a second strand, wherein the first strand comprises at least 15 contiguous nt differing by 0, 1, 2, or 3 nt from a first strand of: AD-40002.1 (SEQ ID NO: 795), or a modified or unmodified variant thereof.

[0729] A RNAi agent comprising a first and a second strand, wherein the first strand comprises at least 15 contiguous nt differing by 0, 1, 2, or 3 nt from a first strand of: AD-40008.1 (SEQ ID NO: 796), or a modified or unmodified variant thereof.

[0730] A RNAi agent comprising a first and a second strand, wherein the first strand comprises at least 15 contiguous nt differing by 0, 1, 2, or 3 nt from a first strand of: AD-40014.1 (SEQ ID NO: 797), or a modified or unmodified variant thereof.

[0731] A RNAi agent comprising a first and a second strand, wherein the first strand comprises at least 15 contiguous nt differing by 0, 1, 2, or 3 nt from a first strand of: AD-40020.1 (SEQ ID NO: 798), or a modified or unmodified variant thereof.

[0732] A RNAi agent comprising a first and a second strand, wherein the first strand comprises at least 15 contiguous nt differing by 0, 1, 2, or 3 nt from a first strand of: AD-40026.1 (SEQ ID NO: 799), or a modified or unmodified variant thereof.

[0733] A RNAi agent comprising a first and a second strand, wherein the first strand comprises at least 15 contiguous nt differing by 0, 1, 2, or 3 nt from a first strand of: AD-40032.1 (SEQ ID NO: 800), or a modified or unmodified variant thereof.

[0734] A RNAi agent comprising a first and a second strand, wherein the first strand comprises at least 15 contiguous nt differing by 0, 1, 2, or 3 nt from a first strand of: AD-40038.1 (SEQ ID NO: 801), or a modified or unmodified variant thereof.

[0735] A RNAi agent comprising a first and a second strand, wherein the first strand comprises at least 15 contiguous nt differing by 0, 1, 2, or 3 nt from a first strand of: AD-39997.1 (SEQ ID NO: 802), or a modified or unmodified variant thereof.

[0736] A RNAi agent comprising a first and a second strand, wherein the first strand comprises at least 15 contiguous nt differing by 0, 1, 2, or 3 nt from a first strand of: AD-40009.1 (SEQ ID NO: 803), or a modified or unmodified variant thereof.

[0737] A RNAi agent comprising a first and a second strand, wherein the first strand comprises at least 15 contiguous nt differing by 0, 1, 2, or 3 nt from a first strand of: AD-40015.1 (SEQ ID NO: 804), or a modified or unmodified variant thereof.

[0738] A RNAi agent comprising a first and a second strand, wherein the first strand comprises at least 15 contiguous nt differing by 0, 1, 2, or 3 nt from a first strand of: AD-40021.1 (SEQ ID NO: 805), or a modified or unmodified variant thereof.

[0739] A RNAi agent comprising a first and a second strand, wherein the first strand comprises at least 15 contiguous nt differing by 0, 1, 2, or 3 nt from a first strand of: AD-40027.1 (SEQ ID NO: 806), or a modified or unmodified variant thereof.

[0740] A RNAi agent comprising a first and a second strand, wherein the first strand comprises at least 15 contiguous nt differing by 0, 1, 2, or 3 nt from a first strand of: AD-40033.1 (SEQ ID NO: 807), or a modified or unmodified variant thereof.

[0741] A RNAi agent comprising a first and a second strand, wherein the first strand comprises at least 15 contiguous nt differing by 0, 1, 2, or 3 nt from a first strand of: AD-40039.1 (SEQ ID NO: 808), or a modified or unmodified variant thereof.

[0742] A RNAi agent comprising a first and a second strand, wherein the first strand comprises at least 15 contiguous nt differing by 0, 1, 2, or 3 nt from a first strand of: AD-40045.1 (SEQ ID NO: 809), or a modified or unmodified variant thereof.

[0743] A RNAi agent comprising a first and a second strand, wherein the first strand comprises at least 15 contiguous nt differing by 0, 1, 2, or 3 nt from a first strand of: AD-40051.1 (SEQ ID NO: 810), or a modified or unmodified variant thereof.

[0744] A RNAi agent comprising a first and a second strand, wherein the first strand comprises at least 15 contiguous nt differing by 0, 1, 2, or 3 nt from a first strand of: AD-40057.1 (SEQ ID NO: 811), or a modified or unmodified variant thereof.

[0745] A RNAi agent comprising a first and a second strand, wherein the first strand comprises at least 15 contiguous nt differing by 0, 1, 2, or 3 nt from a first strand of: AD-40063.1 (SEQ ID NO: 812), or a modified or unmodified variant thereof.

[0746] A RNAi agent comprising a first and a second strand, wherein the first strand comprises at least 15 contiguous nt differing by 0, 1, 2, or 3 nt from a first strand of: AD-40069.1 (SEQ ID NO: 813), or a modified or unmodified variant thereof.

[0747] A RNAi agent comprising a first and a second strand, wherein the first strand comprises at least 15 contiguous nt differing by 0, 1, 2, or 3 nt from a first strand of: AD-40075.1 (SEQ ID NO: 814), or a modified or unmodified variant thereof.

[0748] A RNAi agent comprising a first and a second strand, wherein the first strand comprises at least 15 contiguous nt differing by 0, 1, 2, or 3 nt from a first strand of: AD-40081.1 (SEQ ID NO: 815), or a modified or unmodified variant thereof.

[0749] A RNAi agent comprising a first and a second strand, wherein the first strand comprises at least 15 contiguous nt differing by 0, 1, 2, or 3 nt from a first strand of: AD-40040.1 (SEQ ID NO: 816), or a modified or unmodified variant thereof.

[0750] A RNAi agent comprising a first and a second strand, wherein the first strand comprises at least 15 contiguous nt differing by 0, 1, 2, or 3 nt from a first strand of: AD-40046.1 (SEQ ID NO: 817), or a modified or unmodified variant thereof.

[0751] A RNAi agent comprising a first and a second strand, wherein the first strand comprises at least 15 contiguous nt differing by 0, 1, 2, or 3 nt from a first strand of: AD-40052.1 (SEQ ID NO: 818), or a modified or unmodified variant thereof.

[0752] A RNAi agent comprising a first and a second strand, wherein the first strand comprises at least 15 contiguous nt differing by 0, 1, 2, or 3 nt from a first strand of: AD-40058.1 (SEQ ID NO: 819), or a modified or unmodified variant thereof.

[0753] A RNAi agent comprising a first and a second strand, wherein the first strand comprises at least 15 contiguous nt differing by 0, 1, 2, or 3 nt from a first strand of: AD-40064.1 (SEQ ID NO: 820), or a modified or unmodified variant thereof.

[0754] A RNAi agent comprising a first and a second strand, wherein the first strand comprises at least 15 contiguous nt differing by 0, 1, 2, or 3 nt from a first strand of: AD-40070.1 (SEQ ID NO: 821), or a modified or unmodified variant thereof.

[0755] A RNAi agent comprising a first and a second strand, wherein the first strand comprises at least 15 contiguous nt differing by 0, 1, 2, or 3 nt from a first strand of: AD-40076.1 (SEQ ID NO: 822), or a modified or unmodified variant thereof.

[0756] A RNAi agent comprising a first and a second strand, wherein the first strand comprises at least 15 contiguous nt differing by 0, 1, 2, or 3 nt from a first strand of: AD-40082.1 (SEQ ID NO: 823), or a modified or unmodified variant thereof.

[0757] A RNAi agent comprising a first and a second strand, wherein the first strand comprises at least 15 contiguous nt differing by 0, 1, 2, or 3 nt from a first strand of: AD-40041.1 (SEQ ID NO: 824), or a modified or unmodified variant thereof.

[0758] A RNAi agent comprising a first and a second strand, wherein the first strand comprises at least 15 contiguous nt differing by 0, 1, 2, or 3 nt from a first strand of: AD-40047.1 (SEQ ID NO: 825), or a modified or unmodified variant thereof.

[0759] A RNAi agent comprising a first and a second strand, wherein the first strand comprises at least 15 contiguous nt differing by 0, 1, 2, or 3 nt from a first strand of: AD-40053.1 (SEQ ID NO: 826), or a modified or unmodified variant thereof.

[0760] A RNAi agent comprising a first and a second strand, wherein the first strand comprises at least 15 contiguous nt differing by 0, 1, 2, or 3 nt from a first strand of: AD-40059.1 (SEQ ID NO: 827), or a modified or unmodified variant thereof.

[0761] A RNAi agent comprising a first and a second strand, wherein the first strand comprises at least 15 contiguous nt differing by 0, 1, 2, or 3 nt from a first strand of: AD-40065.1 (SEQ ID NO: 828), or a modified or unmodified variant thereof.

[0762] A RNAi agent comprising a first and a second strand, wherein the first strand comprises at least 15 contiguous nt differing by 0, 1, 2, or 3 nt from a first strand of: AD-40071.1 (SEQ ID NO: 829), or a modified or unmodified variant thereof.

[0763] A RNAi agent comprising a first and a second strand, wherein the first strand comprises at least 15 contiguous nt differing by 0, 1, 2, or 3 nt from a first strand of: AD-40077.1 (SEQ ID NO: 830), or a modified or unmodified variant thereof.

[0764] A RNAi agent comprising a first and a second strand, wherein the first strand comprises at least 15 contiguous nt differing by 0, 1, 2, or 3 nt from a first strand of: AD-40083.1 (SEQ ID NO: 831), or a modified or unmodified variant thereof.

[0765] A RNAi agent comprising a first and a second strand, wherein the first strand comprises at least 15 contiguous nt differing by 0, 1, 2, or 3 nt from a first strand of: AD-40042.1 (SEQ ID NO: 832), or a modified or unmodified variant thereof.

[0766] A RNAi agent comprising a first and a second strand, wherein the first strand comprises at least 15 contiguous nt differing by 0, 1, 2, or 3 nt from a first strand of: AD-40048.1 (SEQ ID NO: 833), or a modified or unmodified variant thereof.

[0767] A RNAi agent comprising a first and a second strand, wherein the first strand comprises at least 15 contiguous nt differing by 0, 1, 2, or 3 nt from a first strand of: AD-40054.1 (SEQ ID NO: 834), or a modified or unmodified variant thereof.

[0768] A RNAi agent comprising a first and a second strand, wherein the first strand comprises at least 15 contiguous nt differing by 0, 1, 2, or 3 nt from a first strand of: AD-40060.1 (SEQ ID NO: 835), or a modified or unmodified variant thereof.

[0769] A RNAi agent comprising a first and a second strand, wherein the first strand comprises at least 15 contiguous nt differing by 0, 1, 2, or 3 nt from a first strand of: AD-40066.1 (SEQ ID NO: 836), or a modified or unmodified variant thereof.

[0770] A RNAi agent comprising a first and a second strand, wherein the first strand comprises at least 15 contiguous nt differing by 0, 1, 2, or 3 nt from a first strand of: AD-40072.1 (SEQ ID NO: 837), or a modified or unmodified variant thereof.

[0771] A RNAi agent comprising a first and a second strand, wherein the first strand comprises at least 15 contiguous nt differing by 0, 1, 2, or 3 nt from a first strand of: AD-40078.1 (SEQ ID NO: 838), or a modified or unmodified variant thereof.

[0772] A RNAi agent comprising a first and a second strand, wherein the first strand comprises at least 15 contiguous nt differing by 0, 1, 2, or 3 nt from a first strand of: AD-40084.1 (SEQ ID NO: 839), or a modified or unmodified variant thereof.

[0773] A RNAi agent comprising a first and a second strand, wherein the first strand comprises at least 15 contiguous nt differing by 0, 1, 2, or 3 nt from a first strand of: AD-40043.1 (SEQ ID NO: 840), or a modified or unmodified variant thereof.

[0774] A RNAi agent comprising a first and a second strand, wherein the first strand comprises at least 15 contiguous nt differing by 0, 1, 2, or 3 nt from a first strand of: AD-40049.1 (SEQ ID NO: 841), or a modified or unmodified variant thereof.

[0775] A RNAi agent comprising a first and a second strand, wherein the first strand comprises at least 15 contiguous nt differing by 0, 1, 2, or 3 nt from a first strand of: AD-40055.1 (SEQ ID NO: 842), or a modified or unmodified variant thereof.

[0776] A RNAi agent comprising a first and a second strand, wherein the first strand comprises at least 15 contiguous nt differing by 0, 1, 2, or 3 nt from a first strand of: AD-40061.1 (SEQ ID NO: 843), or a modified or unmodified variant thereof.

[0777] A RNAi agent comprising a first and a second strand, wherein the first strand comprises at least 15 contiguous nt differing by 0, 1, 2, or 3 nt from a first strand of: AD-40067.1 (SEQ ID NO: 844), or a modified or unmodified variant thereof.

[0778] A RNAi agent comprising a first and a second strand, wherein the first strand comprises at least 15 contiguous nt differing by 0, 1, 2, or 3 nt from a first strand of: AD-40073.1 (SEQ ID NO: 845), or a modified or unmodified variant thereof.

[0779] A RNAi agent comprising a first and a second strand, wherein the first strand comprises at least 15 contiguous nt differing by 0, 1, 2, or 3 nt from a first strand of: AD-40079.1 (SEQ ID NO: 846), or a modified or unmodified variant thereof.

[0780] A RNAi agent comprising a first and a second strand, wherein the first strand comprises at least 15 contiguous nt differing by 0, 1, 2, or 3 nt from a first strand of: AD-40085.1 (SEQ ID NO: 847), or a modified or unmodified variant thereof.

[0781] A RNAi agent comprising a first and a second strand, wherein the first strand comprises at least 15 contiguous nt differing by 0, 1, 2, or 3 nt from a first strand of: AD-40044.1 (SEQ ID NO: 848), or a modified or unmodified variant thereof.

[0782] A RNAi agent comprising a first and a second strand, wherein the first strand comprises at least 15 contiguous nt differing by 0, 1, 2, or 3 nt from a first strand of: AD-40050.1 (SEQ ID NO: 849), or a modified or unmodified variant thereof.

[0783] A RNAi agent comprising a first and a second strand, wherein the first strand comprises at least 15 contiguous nt differing by 0, 1, 2, or 3 nt from a first strand of: AD-40056.1 (SEQ ID NO: 850), or a modified or unmodified variant thereof.

[0784] A RNAi agent comprising a first and a second strand, wherein the first strand comprises at least 15 contiguous nt differing by 0, 1, 2, or 3 nt from a first strand of: AD-40062.1 (SEQ ID NO: 851), or a modified or unmodified variant thereof.

[0785] A RNAi agent comprising a first and a second strand, wherein the first strand comprises at least 15 contiguous nt differing by 0, 1, 2, or 3 nt from a first strand of: AD-40068.1 (SEQ ID NO: 852), or a modified or unmodified variant thereof.

[0786] A RNAi agent comprising a first and a second strand, wherein the first strand comprises at least 15 contiguous nt differing by 0, 1, 2, or 3 nt from a first strand of: AD-40074.1 (SEQ ID NO: 853), or a modified or unmodified variant thereof.

[0787] A RNAi agent comprising a first and a second strand, wherein the first strand comprises at least 15 contiguous nt differing by 0, 1, 2, or 3 nt from a first strand of: AD-40080.1 (SEQ ID NO: 854), or a modified or unmodified variant thereof.

[0788] A RNAi agent comprising a first and a second strand, wherein the first strand comprises at least 15 contiguous nt differing by 0, 1, 2, or 3 nt from a first strand of: AD-39720.1 (SEQ ID NO: 1754), or a modified or unmodified variant thereof.

[0789] A RNAi agent comprising a first and a second strand, wherein the first strand comprises at least 15 contiguous nt differing by 0, 1, 2, or 3 nt from a first strand of: AD-39706.1 (SEQ ID NO: 1755), or a modified or unmodified variant thereof.

[0790] A RNAi agent comprising a first and a second strand, wherein the first strand comprises at least 15 contiguous nt differing by 0, 1, 2, or 3 nt from a first strand of: AD-39712.1 (SEQ ID NO: 1756), or a modified or unmodified variant thereof.

[0791] A RNAi agent comprising a first and a second strand, wherein the first strand comprises at least 15 contiguous nt differing by 0, 1, 2, or 3 nt from a first strand of: AD-39760.1 (SEQ ID NO: 1757), or a modified or unmodified variant thereof.

[0792] A RNAi agent comprising a first and a second strand, wherein the first strand comprises at least 15 contiguous nt differing by 0, 1, 2, or 3 nt from a first strand of: AD-39732.1 (SEQ ID NO: 1758), or a modified or unmodified variant thereof.

[0793] A RNAi agent comprising a first and a second strand, wherein the first strand comprises at least 15 contiguous nt differing by 0, 1, 2, or 3 nt from a first strand of: AD-35541.4 (SEQ ID NO: 1759), or a modified or unmodified variant thereof.

[0794] A RNAi agent comprising a first and a second strand, wherein the first strand comprises at least 15 contiguous nt differing by 0, 1, 2, or 3 nt from a first strand of: AD-39735.1 or hs_KRAS_{—}321_A22S26 (SEQ ID NO: 1760), or a modified or unmodified variant thereof.

[0795] A RNAi agent comprising a first and a second strand, wherein the first strand comprises at least 15 contiguous nt differing by 0, 1, 2, or 3 nt from a first strand of: AD-39741.1, or modified or unmodified variants thereof.

[0796] A RNAi agent comprising a first and a second strand, wherein the first strand comprises at least 15 contiguous nt differing by 0, 1, 2, or 3 nt from a first strand of: hs_KRAS_{—} 322_A22S26 (SEQ ID NO: 1761), or a modified or unmodified variant thereof.

[0797] A RNAi agent comprising a first and a second strand, wherein the first strand comprises at least 15 contiguous nt differing by 0, 1, 2, or 3 nt from a first strand of: AD-39778.1 (SEQ ID NO: 1762), or a modified or unmodified variant thereof.

[0798] A RNAi agent comprising a first and a second strand, wherein the first strand comprises at least 15 contiguous nt differing by 0, 1, 2, or 3 nt from a first strand of: AD-39790.1 (SEQ ID NO: 1763), or a modified or unmodified variant thereof.

[0799] A RNAi agent comprising a first and a second strand, wherein the first strand comprises at least 15 contiguous nt differing by 0, 1, 2, or 3 nt from a first strand of: AD-39822.1 (SEQ ID NO: 1764), or a modified or unmodified variant thereof.

[0800] A RNAi agent comprising a first and a second strand, wherein the first strand comprises at least 15 contiguous nt differing by 0, 1, 2, or 3 nt from a first strand of: AD-35609.4 (SEQ ID NO: 1765), or a modified or unmodified variant thereof.

[0801] A RNAi agent comprising a first and a second strand, wherein the first strand comprises at least 15 contiguous nt differing by 0, 1, 2, or 3 nt from a first strand of: AD-35581.4 (SEQ ID NO: 1766), or a modified or unmodified variant thereof.

[0802] A RNAi agent comprising a first and a second strand, wherein the first strand comprises at least 15 contiguous nt differing by 0, 1, 2, or 3 nt from a first strand of: AD-39845.1 (SEQ ID NO: 1767), or a modified or unmodified variant thereof.

[0803] A RNAi agent comprising a first and a second strand, wherein the first strand comprises at least 15 contiguous nt differing by 0, 1, 2, or 3 nt from a first strand of: AD-39858.1 (SEQ ID NO: 1768), or a modified or unmodified variant thereof.

[0804] A RNAi agent comprising a first and a second strand, wherein the first strand comprises at least 15 contiguous nt differing by 0, 1, 2, or 3 nt from a first strand of: AD-39870.1 (SEQ ID NO: 1769), or a modified or unmodified variant thereof.

[0805] A RNAi agent comprising a first and a second strand, wherein the first strand comprises at least 15 contiguous nt differing by 0, 1, 2, or 3 nt from a first strand of: AD-35576.4 (SEQ ID NO: 1770), or a modified or unmodified variant thereof.

[0806] A RNAi agent comprising a first and a second strand, wherein the first strand comprises at least 15 contiguous nt differing by 0, 1, 2, or 3 nt from a first strand of: AD-35588.4 (SEQ ID NO: 1771), or a modified or unmodified variant thereof.

[0807] A RNAi agent comprising a first and a second strand, wherein the first strand comprises at least 15 contiguous nt differing by 0, 1, 2, or 3 nt from a first strand of: AD-35600.1 (SEQ ID NO: 1772), or a modified or unmodified variant thereof.

[0808] A RNAi agent comprising a first and a second strand, wherein the first strand comprises at least 15 contiguous nt differing by 0, 1, 2, or 3 nt from a first strand of: AD-35606.1 (SEQ ID NO: 1773), or a modified or unmodified variant thereof.

[0809] A RNAi agent comprising a first and a second strand, wherein the first strand comprises at least 15 contiguous nt differing by 0, 1, 2, or 3 nt from a first strand of: AD-38151.1 (SEQ ID NO: 1774), or a modified or unmodified variant thereof.

[0810] A RNAi agent comprising a first and a second strand, wherein the first strand comprises at least 15 contiguous nt differing by 0, 1, 2, or 3 nt from a first strand of: AD-38163.1 (SEQ ID NO: 1775), or a modified or unmodified variant thereof.

[0811] A RNAi agent comprising a first and a second strand, wherein the first strand comprises at least 15 contiguous nt differing by 0, 1, 2, or 3 nt from a first strand of: AD-39999.1 (SEQ ID NO: 1776), or a modified or unmodified variant thereof.

[0812] A RNAi agent comprising a first and a second strand, wherein the first strand comprises at least 15 contiguous nt differing by 0, 1, 2, or 3 nt from a first strand of: AD-38159.1 or hs_KRAS_{—}528_A22S26 (SEQ ID NO: 1777), or a modified or unmodified variant thereof.

[0813] A RNAi agent comprising a first and a second strand, wherein the first strand comprises at least 15 contiguous nt differing by 0, 1, 2, or 3 nt from a first strand of: AD-38130.1 or hs_KRAS_{—}531_A22S26 (SEQ ID NO: 1778), or a modified or unmodified variant thereof.

[0814] A RNAi agent comprising a first and a second strand, wherein the first strand comprises at least 15 contiguous nt differing by 0, 1, 2, or 3 nt from a first strand of: AD-38136.1 (SEQ ID NO: 1779), or a modified or unmodified variant thereof.

[0815] A RNAi agent comprising a first and a second strand, wherein the first strand comprises at least 15 contiguous nt differing by 0, 1, 2, or 3 nt from a first strand of: AD-40036.1 (SEQ ID NO: 1780), or a modified or unmodified variant thereof.

[0816] A RNAi agent comprising a first and a second strand, wherein the first strand comprises at least 15 contiguous nt differing by 0, 1, 2, or 3 nt from a first strand of: AD-40008.1 (SEQ ID NO: 1781), or a modified or unmodified variant thereof.

[0817] A RNAi agent comprising a first and a second strand, wherein the first strand comprises at least 15 contiguous nt differing by 0, 1, 2, or 3 nt from a first strand of: AD-40021.1 (SEQ ID NO: 1782), or a modified or unmodified variant thereof.

[0818] A RNAi agent comprising a first and a second strand, wherein the first strand comprises at least 15 contiguous nt differing by 0, 1, 2, or 3 nt from a first strand of: AD-40077.1 (SEQ ID NO: 1783), or a modified or unmodified variant thereof.

[0819] A RNAi agent comprising a first and a second strand, wherein the first strand comprises at least 15 contiguous nt differing by 0, 1, 2, or 3 nt from a first strand of: AD-40072.1 (SEQ ID NO: 1784), or a modified or unmodified variant thereof.

[0820] A RNAi agent comprising a first and a second strand, wherein the first strand comprises at least 15 contiguous nt differing by 0, 1, 2, or 3 nt from a first strand of: AD-40061.1 (SEQ ID NO: 1785), or a modified or unmodified variant thereof.

[0821] A RNAi agent comprising a first and a second strand, wherein the first strand comprises at least 15 contiguous nt differing by 0, 1, 2, or 3 nt from a first strand of: AD-40068.1 (SEQ ID NO: 1786), or a modified or unmodified variant thereof.

[0822] A RNAi agent comprising a first and a second strand, wherein the first strand comprises at least 15 contiguous nt differing by 0, 1, 2, or 3 nt from a first strand of: AD-38131.1 (SEQ ID NO: 1787), or a modified or unmodified variant thereof.

[0823] A RNAi agent comprising a first and a second strand, wherein the first strand comprises at least 15 contiguous nt differing by 0, 1, 2, or 3 nt from a first strand of: AD-38167.1 (SEQ ID NO: 1788), or a modified or unmodified variant thereof.

[0824] A RNAi agent comprising a first and a second strand, wherein the first strand comprises at least 15 contiguous nt differing by 0, 1, 2, or 3 nt from a first strand of: hs_KRAS 1273_A22S26 (SEQ ID NO: 1789), or a modified or unmodified variant thereof.

[0825] A RNAi agent comprising a first and a second strand, wherein the first strand comprises at least 15 contiguous nt differing by 0, 1, 2, or 3 nt from a first strand of: hs_KRAS 2892_A37S26 (SEQ ID NO: 1790), or a modified or unmodified variant thereof.

[0826] A RNAi agent comprising a first and a second strand, wherein the first strand comprises at least 15 contiguous nt differing by 0, 1, 2, or 3 nt from a first strand of: hs_KRAS 4731_A22S26 (SEQ ID NO: 1791), or a modified or unmodified variant thereof.

[0827] Specific embodiments comprising at least 15 contiguous nucleotides of any RNAi agent disclosed herein

[0828] In one embodiment, the present disclosure pertains to: a composition comprising any one or more of: a RNAi agent comprising a first strand and a second strand, wherein the first strand comprises at least 15 contiguous nucleotides (differing by 0 nucleotides) from a first strand of: any RNAi agent from any of Tables 1 to 6 or modified or unmodified variants thereof.

[0829] Thus, in various embodiments, the present disclosure pertains to a composition comprising any one or more of the following:

[0830] A RNAi agent comprising a first strand and a second strand, wherein the first strand comprises at least 15 contiguous nucleotides from a first strand of: AD-35523.3 (SEQ ID NO: 428), or a modified or unmodified variant thereof.

[0831] A RNAi agent comprising a first strand and a second strand, wherein the first strand comprises at least 15 contiguous nucleotides from a first strand of: AD-35529.1 (SEQ ID NO: 429), or a modified or unmodified variant thereof.

[0832] A RNAi agent comprising a first strand and a second strand, wherein the first strand comprises at least 15 contiguous nucleotides from a first strand of: AD-35535.4 (SEQ ID NO: 430), or a modified or unmodified variant thereof.

[0833] A RNAi agent comprising a first strand and a second strand, wherein the first strand comprises at least 15 contiguous nucleotides from a first strand of: AD-35541.4 (SEQ ID NO: 431), or a modified or unmodified variant thereof.

[0834] A RNAi agent comprising a first strand and a second strand, wherein the first strand comprises at least 15 contiguous nucleotides from a first strand of: AD-35547.4 (SEQ ID NO: 432), or a modified or unmodified variant thereof.

[0835] A RNAi agent comprising a first strand and a second strand, wherein the first strand comprises at least 15 contiguous nucleotides from a first strand of: AD-35553.4 (SEQ ID NO: 433), or a modified or unmodified variant thereof.

[0836] A RNAi agent comprising a first strand and a second strand, wherein the first strand comprises at least 15 contiguous nucleotides from a first strand of: AD-35559.4 (SEQ ID NO: 434), or a modified or unmodified variant thereof.

[0837] A RNAi agent comprising a first strand and a second strand, wherein the first strand comprises at least 15 contiguous nucleotides from a first strand of: AD-35565.4 (SEQ ID NO: 435), or a modified or unmodified variant thereof.

[0838] A RNAi agent comprising a first strand and a second strand, wherein the first strand comprises at least 15 contiguous nucleotides from a first strand of: AD-35524.4 (SEQ ID NO: 436), or a modified or unmodified variant thereof.

[0839] A RNAi agent comprising a first strand and a second strand, wherein the first strand comprises at least 15 contiguous nucleotides from a first strand of: AD-35530.4 (SEQ ID NO: 437), or a modified or unmodified variant thereof.

[0840] A RNAi agent comprising a first strand and a second strand, wherein the first strand comprises at least 15 contiguous nucleotides from a first strand of: AD-35536.4 (SEQ ID NO: 438), or a modified or unmodified variant thereof.

[0841] A RNAi agent comprising a first strand and a second strand, wherein the first strand comprises at least 15 contiguous nucleotides from a first strand of: AD-35542.4 (SEQ ID NO: 439), or a modified or unmodified variant thereof.

[0842] A RNAi agent comprising a first strand and a second strand, wherein the first strand comprises at least 15 contiguous nucleotides from a first strand of: AD-35548.4 (SEQ ID NO: 440), or a modified or unmodified variant thereof.

[0843] A RNAi agent comprising a first strand and a second strand, wherein the first strand comprises at least 15 contiguous nucleotides from a first strand of: AD-35554.4 (SEQ ID NO: 441), or a modified or unmodified variant thereof.

[0844] A RNAi agent comprising a first strand and a second strand, wherein the first strand comprises at least 15 contiguous nucleotides from a first strand of: AD-35560.2 (SEQ ID NO: 442), or a modified or unmodified variant thereof.

[0845] A RNAi agent comprising a first strand and a second strand, wherein the first strand comprises at least 15 contiguous nucleotides from a first strand of: AD-35566.4 (SEQ ID NO: 443), or a modified or unmodified variant thereof.

[0846] A RNAi agent comprising a first strand and a second strand, wherein the first strand comprises at least 15 contiguous nucleotides from a first strand of: AD-35525.2 (SEQ ID NO: 444), or a modified or unmodified variant thereof.

[0847] A RNAi agent comprising a first strand and a second strand, wherein the first strand comprises at least 15 contiguous nucleotides from a first strand of: AD-35531.4 (SEQ ID NO: 445), or a modified or unmodified variant thereof.

[0848] A RNAi agent comprising a first strand and a second strand, wherein the first strand comprises at least 15 contiguous nucleotides from a first strand of: AD-35537.4 (SEQ ID NO: 446), or a modified or unmodified variant thereof.

[0849] A RNAi agent comprising a first strand and a second strand, wherein the first strand comprises at least 15 contiguous nucleotides from a first strand of: AD-35543.2 (SEQ ID NO: 447), or a modified or unmodified variant thereof.

[0850] A RNAi agent comprising a first strand and a second strand, wherein the first strand comprises at least 15 contiguous nucleotides from a first strand of: AD-35549.4 (SEQ ID NO: 448), or a modified or unmodified variant thereof.

[0851] A RNAi agent comprising a first strand and a second strand, wherein the first strand comprises at least 15 contiguous nucleotides from a first strand of: AD-35555.4 (SEQ ID NO: 449), or a modified or unmodified variant thereof.

[0852] A RNAi agent comprising a first strand and a second strand, wherein the first strand comprises at least 15 contiguous nucleotides from a first strand of: AD-35561.4 (SEQ ID NO: 450), or a modified or unmodified variant thereof.

[0853] A RNAi agent comprising a first strand and a second strand, wherein the first strand comprises at least 15 contiguous nucleotides from a first strand of: AD-35567.4 (SEQ ID NO: 451), or a modified or unmodified variant thereof.

[0854] A RNAi agent comprising a first strand and a second strand, wherein the first strand comprises at least 15 contiguous nucleotides from a first strand of: AD-35526.4 (SEQ ID NO: 452), or a modified or unmodified variant thereof.

[0855] A RNAi agent comprising a first strand and a second strand, wherein the first strand comprises at least 15 contiguous nucleotides from a first strand of: AD-35532.4 (SEQ ID NO: 453), or a modified or unmodified variant thereof.

[0856] A RNAi agent comprising a first strand and a second strand, wherein the first strand comprises at least 15 contiguous nucleotides from a first strand of: AD-35538.4 (SEQ ID NO: 454), or a modified or unmodified variant thereof.

[0857] A RNAi agent comprising a first strand and a second strand, wherein the first strand comprises at least 15 contiguous nucleotides from a first strand of: AD-35544.4 (SEQ ID NO: 455), or a modified or unmodified variant thereof.

[0858] A RNAi agent comprising a first strand and a second strand, wherein the first strand comprises at least 15 contiguous nucleotides from a first strand of: AD-35550.4 (SEQ ID NO: 456), or a modified or unmodified variant thereof.

[0859] A RNAi agent comprising a first strand and a second strand, wherein the first strand comprises at least 15 contiguous nucleotides from a first strand of: AD-35556.4 (SEQ ID NO: 457), or a modified or unmodified variant thereof.

[0860] A RNAi agent comprising a first strand and a second strand, wherein the first strand comprises at least 15 contiguous nucleotides from a first strand of: AD-35562.4 (SEQ ID NO: 458), or a modified or unmodified variant thereof.

[0861] A RNAi agent comprising a first strand and a second strand, wherein the first strand comprises at least 15 contiguous nucleotides from a first strand of: AD-35568.4 (SEQ ID NO: 459), or a modified or unmodified variant thereof.

[0862] A RNAi agent comprising a first strand and a second strand, wherein the first strand comprises at least 15 contiguous nucleotides from a first strand of: AD-35527.4 (SEQ ID NO: 460), or a modified or unmodified variant thereof.

[0863] A RNAi agent comprising a first strand and a second strand, wherein the first strand comprises at least 15 contiguous nucleotides from a first strand of: AD-35533.4 (SEQ ID NO: 461),

[0864] A RNAi agent comprising a first strand and a second strand, wherein the first strand comprises at least 15 contiguous nucleotides from a first strand of: AD-35539.4 (SEQ ID NO: 462), or a modified or unmodified variant thereof.

[0865] A RNAi agent comprising a first strand and a second strand, wherein the first strand comprises at least 15 contiguous nucleotides from a first strand of: AD-35545.4 (SEQ ID NO: 463), or a modified or unmodified variant thereof.

[0866] A RNAi agent comprising a first strand and a second strand, wherein the first strand comprises at least 15 contiguous nucleotides from a first strand of: AD-35551.4 (SEQ ID NO: 464), or a modified or unmodified variant thereof.

[0867] A RNAi agent comprising a first strand and a second strand, wherein the first strand comprises at least 15 contiguous nucleotides from a first strand of: AD-35563.4 (SEQ ID NO: 465), or a modified or unmodified variant thereof.

[0868] A RNAi agent comprising a first strand and a second strand, wherein the first strand comprises at least 15 contiguous nucleotides from a first strand of: AD-35528.4 (SEQ ID NO: 466), or a modified or unmodified variant thereof.

[0869] A RNAi agent comprising a first strand and a second strand, wherein the first strand comprises at least 15 contiguous nucleotides from a first strand of: AD-35540.4 (SEQ ID NO: 467), or a modified or unmodified variant thereof.

[0870] A RNAi agent comprising a first strand and a second strand, wherein the first strand comprises at least 15 contiguous nucleotides from a first strand of: AD-35546.4 (SEQ ID NO: 468), or a modified or unmodified variant thereof.

[0871] A RNAi agent comprising a first strand and a second strand, wherein the first strand comprises at least 15 contiguous nucleotides from a first strand of: AD-35552.4 (SEQ ID NO: 469), or a modified or unmodified variant thereof.

[0872] A RNAi agent comprising a first strand and a second strand, wherein the first strand comprises at least 15 contiguous nucleotides from a first strand of: AD-35558.4 (SEQ ID NO: 470), or a modified or unmodified variant thereof.

[0873] A RNAi agent comprising a first strand and a second strand, wherein the first strand comprises at least 15 contiguous nucleotides from a first strand of: AD-35564.4 (SEQ ID NO: 471), or a modified or unmodified variant thereof.

[0874] A RNAi agent comprising a first strand and a second strand, wherein the first strand comprises at least 15 contiguous nucleotides from a first strand of: AD-35570.4 (SEQ ID NO: 472), or a modified or unmodified variant thereof.

[0875] A RNAi agent comprising a first strand and a second strand, wherein the first strand comprises at least 15 contiguous nucleotides from a first strand of: AD-35571.4 (SEQ ID NO: 473), or a modified or unmodified variant thereof.

[0876] A RNAi agent comprising a first strand and a second strand, wherein the first strand comprises at least 15 contiguous nucleotides from a first strand of: AD-35577.4 (SEQ ID NO: 474), or a modified or unmodified variant thereof.

[0877] A RNAi agent comprising a first strand and a second strand, wherein the first strand comprises at least 15 contiguous nucleotides from a first strand of: AD-35583.4 (SEQ ID NO: 475), or a modified or unmodified variant thereof.

[0878] A RNAi agent comprising a first strand and a second strand, wherein the first strand comprises at least 15 contiguous nucleotides from a first strand of: AD-35589.4 (SEQ ID NO: 476), or a modified or unmodified variant thereof.

[0879] A RNAi agent comprising a first strand and a second strand, wherein the first strand comprises at least 15 contiguous nucleotides from a first strand of: AD-35595.4 (SEQ ID NO: 477), or a modified or unmodified variant thereof.

[0880] A RNAi agent comprising a first strand and a second strand, wherein the first strand comprises at least 15 contiguous nucleotides from a first strand of: AD-35601.4 (SEQ ID NO: 478), or a modified or unmodified variant thereof.

[0881] A RNAi agent comprising a first strand and a second strand, wherein the first strand comprises at least 15 contiguous nucleotides from a first strand of: AD-35607.4 (SEQ ID NO: 479), or a modified or unmodified variant thereof.

[0882] A RNAi agent comprising a first strand and a second strand, wherein the first strand comprises at least 15 contiguous nucleotides from a first strand of: AD-35613.4 (SEQ ID NO: 480), or a modified or unmodified variant thereof.

[0883] A RNAi agent comprising a first strand and a second strand, wherein the first strand comprises at least 15 contiguous nucleotides from a first strand of: AD-35572.4 (SEQ ID NO: 481), or a modified or unmodified variant thereof.

[0884] A RNAi agent comprising a first strand and a second strand, wherein the first strand comprises at least 15 contiguous nucleotides from a first strand of: AD-35578.4 (SEQ ID NO: 482), or a modified or unmodified variant thereof.

[0885] A RNAi agent comprising a first strand and a second strand, wherein the first strand comprises at least 15 contiguous nucleotides from a first strand of: AD-35584.4 (SEQ ID NO: 483), or a modified or unmodified variant thereof.

[0886] A RNAi agent comprising a first strand and a second strand, wherein the first strand comprises at least 15 contiguous nucleotides from a first strand of: AD-35590.4 (SEQ ID NO: 484), or a modified or unmodified variant thereof.

[0887] A RNAi agent comprising a first strand and a second strand, wherein the first strand comprises at least 15 contiguous nucleotides from a first strand of: AD-35596.4 (SEQ ID NO: 485), or a modified or unmodified variant thereof.

[0888] A RNAi agent comprising a first strand and a second strand, wherein the first strand comprises at least 15 contiguous nucleotides from a first strand of: AD-35602.4 (SEQ ID NO: 486), or a modified or unmodified variant thereof.

[0889] A RNAi agent comprising a first strand and a second strand, wherein the first strand comprises at least 15 contiguous nucleotides from a first strand of: AD-35608.4 (SEQ ID NO: 487), or a modified or unmodified variant thereof.

[0890] A RNAi agent comprising a first strand and a second strand, wherein the first strand comprises at least 15 contiguous nucleotides from a first strand of: AD-35614.4 (SEQ ID NO: 488), or a modified or unmodified variant thereof.

[0891] A RNAi agent comprising a first strand and a second strand, wherein the first strand comprises at least 15 contiguous nucleotides from a first strand of: AD-35573.4 (SEQ ID NO: 489), or a modified or unmodified variant thereof.

[0892] A RNAi agent comprising a first strand and a second strand, wherein the first strand comprises at least 15 contiguous nucleotides from a first strand of: AD-35579.4 (SEQ ID NO: 490), or a modified or unmodified variant thereof.

[0893] A RNAi agent comprising a first strand and a second strand, wherein the first strand comprises at least 15 contiguous nucleotides from a first strand of: AD-35585.4 (SEQ ID NO: 491), or a modified or unmodified variant thereof.

[0894] A RNAi agent comprising a first strand and a second strand, wherein the first strand comprises at least 15 contiguous nucleotides from a first strand of: AD-35591.4 (SEQ ID NO: 492), or a modified or unmodified variant thereof.

[0895] A RNAi agent comprising a first strand and a second strand, wherein the first strand comprises at least 15 contiguous nucleotides from a first strand of: AD-35597.4 (SEQ ID NO: 493), or a modified or unmodified variant thereof.

[0896] A RNAi agent comprising a first strand and a second strand, wherein the first strand comprises at least 15 contiguous nucleotides from a first strand of: AD-35603.4 (SEQ ID NO: 494), or a modified or unmodified variant thereof.

[0897] A RNAi agent comprising a first strand and a second strand, wherein the first strand comprises at least 15 contiguous nucleotides from a first strand of: AD-35609.4 (SEQ ID NO: 495), or a modified or unmodified variant thereof.

[0898] A RNAi agent comprising a first strand and a second strand, wherein the first strand comprises at least 15 contiguous nucleotides from a first strand of: AD-35615.4 (SEQ ID NO: 496), or a modified or unmodified variant thereof.

[0899] A RNAi agent comprising a first strand and a second strand, wherein the first strand comprises at least 15 contiguous nucleotides from a first strand of: AD-35574.4 (SEQ ID NO: 497), or a modified or unmodified variant thereof.

[0900] A RNAi agent comprising a first strand and a second strand, wherein the first strand comprises at least 15 contiguous nucleotides from a first strand of: AD-35580.1 (SEQ ID NO: 498), or a modified or unmodified variant thereof.

[0901] A RNAi agent comprising a first strand and a second strand, wherein the first strand comprises at least 15 contiguous nucleotides from a first strand of: AD-35586.4 (SEQ ID NO: 499), or a modified or unmodified variant thereof.

[0902] A RNAi agent comprising a first strand and a second strand, wherein the first strand comprises at least 15 contiguous nucleotides from a first strand of: AD-35592.4 (SEQ ID NO: 500), or a modified or unmodified variant thereof.

[0903] A RNAi agent comprising a first strand and a second strand, wherein the first strand comprises at least 15 contiguous nucleotides from a first strand of: AD-35598.4 (SEQ ID NO: 501), or a modified or unmodified variant thereof.

[0904] A RNAi agent comprising a first strand and a second strand, wherein the first strand comprises at least 15 contiguous nucleotides from a first strand of: AD-35604.4 (SEQ ID NO: 502),

[0905] A RNAi agent comprising a first strand and a second strand, wherein the first strand comprises at least 15 contiguous nucleotides from a first strand of: AD-35610.4 (SEQ ID NO: 503), or a modified or unmodified variant thereof.

[0906] A RNAi agent comprising a first strand and a second strand, wherein the first strand comprises at least 15 contiguous nucleotides from a first strand of: AD-35616.4 (SEQ ID NO: 504), or a modified or unmodified variant thereof.

[0907] A RNAi agent comprising a first strand and a second strand, wherein the first strand comprises at least 15 contiguous nucleotides from a first strand of: AD-35575.4 (SEQ ID NO: 505), or a modified or unmodified variant thereof.

[0908] A RNAi agent comprising a first strand and a second strand, wherein the first strand comprises at least 15 contiguous nucleotides from a first strand of: AD-35581.4 (SEQ ID NO: 506), or a modified or unmodified variant thereof.

[0909] A RNAi agent comprising a first strand and a second strand, wherein the first strand comprises at least 15 contiguous nucleotides from a first strand of: AD-35587.4 (SEQ ID NO: 507), or a modified or unmodified variant thereof.

[0910] A RNAi agent comprising a first strand and a second strand, wherein the first strand comprises at least 15 contiguous nucleotides from a first strand of: AD-35593.4 (SEQ ID NO: 508), or a modified or unmodified variant thereof.

[0911] A RNAi agent comprising a first strand and a second strand, wherein the first strand comprises at least 15 contiguous nucleotides from a first strand of: AD-35599.4 (SEQ ID NO: 509), or a modified or unmodified variant thereof.

[0912] A RNAi agent comprising a first strand and a second strand, wherein the first strand comprises at least 15 contiguous nucleotides from a first strand of: AD-35605.4 (SEQ ID NO: 510), or a modified or unmodified variant thereof.

[0913] A RNAi agent comprising a first strand and a second strand, wherein the first strand comprises at least 15 contiguous nucleotides from a first strand of: AD-35611.4 (SEQ ID NO: 511), or a modified or unmodified variant thereof.

[0914] A RNAi agent comprising a first strand and a second strand, wherein the first strand comprises at least 15 contiguous nucleotides from a first strand of: AD-35617.4 (SEQ ID NO: 512), or a modified or unmodified variant thereof.

[0915] A RNAi agent comprising a first strand and a second strand, wherein the first strand comprises at least 15 contiguous nucleotides from a first strand of: AD-35576.4 (SEQ ID NO: 513), or a modified or unmodified variant thereof.

[0916] A RNAi agent comprising a first strand and a second strand, wherein the first strand comprises at least 15 contiguous nucleotides from a first strand of: AD-35588.4 (SEQ ID NO: 514), or a modified or unmodified variant thereof.

[0917] A RNAi agent comprising a first strand and a second strand, wherein the first strand comprises at least 15 contiguous nucleotides from a first strand of: AD-35667.1 (SEQ ID NO: 515), or a modified or unmodified variant thereof.

[0918] A RNAi agent comprising a first strand and a second strand, wherein the first strand comprises at least 15 contiguous nucleotides from a first strand of: AD-35673.1 (SEQ ID NO: 516), or a modified or unmodified variant thereof.

[0919] A RNAi agent comprising a first strand and a second strand, wherein the first strand comprises at least 15 contiguous nucleotides from a first strand of: AD-35679.1 (SEQ ID NO: 517), or a modified or unmodified variant thereof.

[0920] A RNAi agent comprising a first strand and a second strand, wherein the first strand comprises at least 15 contiguous nucleotides from a first strand of: AD-35685.1 (SEQ ID NO: 518), or a modified or unmodified variant thereof.

[0921] A RNAi agent comprising a first strand and a second strand, wherein the first strand comprises at least 15 contiguous nucleotides from a first strand of: AD-35691.1 (SEQ ID NO: 519), or a modified or unmodified variant thereof.

[0922] A RNAi agent comprising a first strand and a second strand, wherein the first strand comprises at least 15 contiguous nucleotides from a first strand of: AD-35557.1 (SEQ ID NO: 520), or a modified or unmodified variant thereof.

[0923] A RNAi agent comprising a first strand and a second strand, wherein the first strand comprises at least 15 contiguous nucleotides from a first strand of: AD-35618.1 (SEQ ID NO: 521), or a modified or unmodified variant thereof.

[0924] A RNAi agent comprising a first strand and a second strand, wherein the first strand comprises at least 15 contiguous nucleotides from a first strand of: AD-35569.1 (SEQ ID NO: 522), or a modified or unmodified variant thereof.

[0925] A RNAi agent comprising a first strand and a second strand, wherein the first strand comprises at least 15 contiguous nucleotides from a first strand of: AD-35534.1 (SEQ ID NO: 523), or a modified or unmodified variant thereof.

[0926] A RNAi agent comprising a first strand and a second strand, wherein the first strand comprises at least 15 contiguous nucleotides from a first strand of: AD-35582.1 (SEQ ID NO: 524), or a modified or unmodified variant thereof.

[0927] A RNAi agent comprising a first strand and a second strand, wherein the first strand comprises at least 15 contiguous nucleotides from a first strand of: AD-35594.1 (SEQ ID NO: 525), or a modified or unmodified variant thereof.

[0928] A RNAi agent comprising a first strand and a second strand, wherein the first strand comprises at least 15 contiguous nucleotides from a first strand of: AD-35600.1 (SEQ ID NO: 526), or a modified or unmodified variant thereof.

[0929] A RNAi agent comprising a first strand and a second strand, wherein the first strand comprises at least 15 contiguous nucleotides from a first strand of: AD-35606.1 (SEQ ID NO: 527), or a modified or unmodified variant thereof.

[0930] A RNAi agent comprising a first strand and a second strand, wherein the first strand comprises at least 15 contiguous nucleotides from a first strand of: AD-35612.1 (SEQ ID NO: 528), or a modified or unmodified variant thereof.

[0931] A RNAi agent comprising a first strand and a second strand, wherein the first strand comprises at least 15 contiguous nucleotides from a first strand of: AD-38127.1 (SEQ ID NO: 529), or a modified or unmodified variant thereof.

[0932] A RNAi agent comprising a first strand and a second strand, wherein the first strand comprises at least 15 contiguous nucleotides from a first strand of: AD-38133.1 (SEQ ID NO: 530), or a modified or unmodified variant thereof.

[0933] A RNAi agent comprising a first strand and a second strand, wherein the first strand comprises at least 15 contiguous nucleotides from a first strand of: AD-38139.1 (SEQ ID NO: 531), or a modified or unmodified variant thereof.

[0934] A RNAi agent comprising a first strand and a second strand, wherein the first strand comprises at least 15 contiguous nucleotides from a first strand of: AD-38145.1 (SEQ ID NO: 532), or a modified or unmodified variant thereof.

[0935] A RNAi agent comprising a first strand and a second strand, wherein the first strand comprises at least 15 contiguous nucleotides from a first strand of: AD-38151.1 (SEQ ID NO: 533), or a modified or unmodified variant thereof.

[0936] A RNAi agent comprising a first strand and a second strand, wherein the first strand comprises at least 15 contiguous nucleotides from a first strand of: AD-38157.1 (SEQ ID NO: 534), or a modified or unmodified variant thereof.

[0937] A RNAi agent comprising a first strand and a second strand, wherein the first strand comprises at least 15 contiguous nucleotides from a first strand of: AD-38163.1 (SEQ ID NO: 535), or a modified or unmodified variant thereof.

[0938] A RNAi agent comprising a first strand and a second strand, wherein the first strand comprises at least 15 contiguous nucleotides from a first strand of: AD-38169.1 (SEQ ID NO: 536), or a modified or unmodified variant thereof.

[0939] A RNAi agent comprising a first strand and a second strand, wherein the first strand comprises at least 15 contiguous nucleotides from a first strand of: AD-38128.1 (SEQ ID NO: 537), or a modified or unmodified variant thereof.

[0940] A RNAi agent comprising a first strand and a second strand, wherein the first strand comprises at least 15 contiguous nucleotides from a first strand of: AD-38134.1 (SEQ ID NO: 538), or a modified or unmodified variant thereof.

[0941] A RNAi agent comprising a first strand and a second strand, wherein the first strand comprises at least 15 contiguous nucleotides from a first strand of: AD-38140.1 (SEQ ID NO: 539), or a modified or unmodified variant thereof.

[0942] A RNAi agent comprising a first strand and a second strand, wherein the first strand comprises at least 15 contiguous nucleotides from a first strand of: AD-38146.1 (SEQ ID NO: 540), or a modified or unmodified variant thereof.

[0943] A RNAi agent comprising a first strand and a second strand, wherein the first strand comprises at least 15 contiguous nucleotides from a first strand of: AD-38152.1 (SEQ ID NO: 541), or a modified or unmodified variant thereof.

[0944] A RNAi agent comprising a first strand and a second strand, wherein the first strand comprises at least 15 contiguous nucleotides from a first strand of: AD-38158.1 (SEQ ID NO: 542), or a modified or unmodified variant thereof.

[0945] A RNAi agent comprising a first strand and a second strand, wherein the first strand comprises at least 15 contiguous nucleotides from a first strand of: AD-38164.1 (SEQ ID NO: 543),

[0946] A RNAi agent comprising a first strand and a second strand, wherein the first strand comprises at least 15 contiguous nucleotides from a first strand of: AD-38170.1 (SEQ ID NO: 544), or a modified or unmodified variant thereof.

[0947] A RNAi agent comprising a first strand and a second strand, wherein the first strand comprises at least 15 contiguous nucleotides from a first strand of: AD-38129.1 (SEQ ID NO: 545), or a modified or unmodified variant thereof.

[0948] A RNAi agent comprising a first strand and a second strand, wherein the first strand comprises at least 15 contiguous nucleotides from a first strand of: AD-38135.1 (SEQ ID NO: 546), or a modified or unmodified variant thereof.

[0949] A RNAi agent comprising a first strand and a second strand, wherein the first strand comprises at least 15 contiguous nucleotides from a first strand of: AD-38141.1 (SEQ ID NO: 547), or a modified or unmodified variant thereof.

[0950] A RNAi agent comprising a first strand and a second strand, wherein the first strand comprises at least 15 contiguous nucleotides from a first strand of: AD-38147.1 (SEQ ID NO: 548), or a modified or unmodified variant thereof.

[0951] A RNAi agent comprising a first strand and a second strand, wherein the first strand comprises at least 15 contiguous nucleotides from a first strand of: AD-38153.1 (SEQ ID NO: 549), or a modified or unmodified variant thereof.

[0952] A RNAi agent comprising a first strand and a second strand, wherein the first strand comprises at least 15 contiguous nucleotides from a first strand of: AD-38159.1 (SEQ ID NO: 550), or a modified or unmodified variant thereof.

[0953] A RNAi agent comprising a first strand and a second strand, wherein the first strand comprises at least 15 contiguous nucleotides from a first strand of: AD-38165.1 (SEQ ID NO: 551), or a modified or unmodified variant thereof.

[0954] A RNAi agent comprising a first strand and a second strand, wherein the first strand comprises at least 15 contiguous nucleotides from a first strand of: AD-38171.1 (SEQ ID NO: 552), or a modified or unmodified variant thereof.

[0955] A RNAi agent comprising a first strand and a second strand, wherein the first strand comprises at least 15 contiguous nucleotides from a first strand of: AD-38130.1 (SEQ ID NO: 553), or a modified or unmodified variant thereof.

[0956] A RNAi agent comprising a first strand and a second strand, wherein the first strand comprises at least 15 contiguous nucleotides from a first strand of: AD-38136.1 (SEQ ID NO: 554), or a modified or unmodified variant thereof.

[0957] A RNAi agent comprising a first strand and a second strand, wherein the first strand comprises at least 15 contiguous nucleotides from a first strand of: AD-38142.1 (SEQ ID NO: 555), or a modified or unmodified variant thereof.

[0958] A RNAi agent comprising a first strand and a second strand, wherein the first strand comprises at least 15 contiguous nucleotides from a first strand of: AD-38148.1 (SEQ ID NO: 556), or a modified or unmodified variant thereof.

[0959] A RNAi agent comprising a first strand and a second strand, wherein the first strand comprises at least 15 contiguous nucleotides from a first strand of: AD-38154.1 (SEQ ID NO: 557), or a modified or unmodified variant thereof.

[0960] A RNAi agent comprising a first strand and a second strand, wherein the first strand comprises at least 15 contiguous nucleotides from a first strand of: AD-38160.1 (SEQ ID NO: 558), or a modified or unmodified variant thereof.

[0961] A RNAi agent comprising a first strand and a second strand, wherein the first strand comprises at least 15 contiguous nucleotides from a first strand of: AD-38166.1 (SEQ ID NO: 559), or a modified or unmodified variant thereof.

[0962] A RNAi agent comprising a first strand and a second strand, wherein the first strand comprises at least 15 contiguous nucleotides from a first strand of: AD-38172.1 (SEQ ID NO: 560), or a modified or unmodified variant thereof.

[0963] A RNAi agent comprising a first strand and a second strand, wherein the first strand comprises at least 15 contiguous nucleotides from a first strand of: AD-38131.1 (SEQ ID NO: 561), or a modified or unmodified variant thereof.

[0964] A RNAi agent comprising a first strand and a second strand, wherein the first strand comprises at least 15 contiguous nucleotides from a first strand of: AD-38137.1 (SEQ ID NO: 562), or a modified or unmodified variant thereof.

[0965] A RNAi agent comprising a first strand and a second strand, wherein the first strand comprises at least 15 contiguous nucleotides from a first strand of: AD-38143.1 (SEQ ID NO: 563), or a modified or unmodified variant thereof.

[0966] A RNAi agent comprising a first strand and a second strand, wherein the first strand comprises at least 15 contiguous nucleotides from a first strand of: AD-38149.1 (SEQ ID NO: 564), or a modified or unmodified variant thereof.

[0967] A RNAi agent comprising a first strand and a second strand, wherein the first strand comprises at least 15 contiguous nucleotides from a first strand of: AD-38155.1 (SEQ ID NO: 565), or a modified or unmodified variant thereof.

[0968] A RNAi agent comprising a first strand and a second strand, wherein the first strand comprises at least 15 contiguous nucleotides from a first strand of: AD-38161.1 (SEQ ID NO: 566), or a modified or unmodified variant thereof.

[0969] A RNAi agent comprising a first strand and a second strand, wherein the first strand comprises at least 15 contiguous nucleotides from a first strand of: AD-38167.1 (SEQ ID NO: 567), or a modified or unmodified variant thereof.

[0970] A RNAi agent comprising a first strand and a second strand, wherein the first strand comprises at least 15 contiguous nucleotides from a first strand of: AD-38173.1 (SEQ ID NO: 568), or a modified or unmodified variant thereof.

[0971] A RNAi agent comprising a first strand and a second strand, wherein the first strand comprises at least 15 contiguous nucleotides from a first strand of: AD-38132.1 (SEQ ID NO: 569), or a modified or unmodified variant thereof.

[0972] A RNAi agent comprising a first strand and a second strand, wherein the first strand comprises at least 15 contiguous nucleotides from a first strand of: AD-38138.1 (SEQ ID NO: 570), or a modified or unmodified variant thereof.

[0973] A RNAi agent comprising a first strand and a second strand, wherein the first strand comprises at least 15 contiguous nucleotides from a first strand of: AD-38144.1 (SEQ ID NO: 571), or a modified or unmodified variant thereof.

[0974] A RNAi agent comprising a first strand and a second strand, wherein the first strand comprises at least 15 contiguous nucleotides from a first strand of: AD-38150.1 (SEQ ID NO: 572), or a modified or unmodified variant thereof.

[0975] A RNAi agent comprising a first strand and a second strand, wherein the first strand comprises at least 15 contiguous nucleotides from a first strand of: AD-38156.1 (SEQ ID NO: 573), or a modified or unmodified variant thereof.

[0976] A RNAi agent comprising a first strand and a second strand, wherein the first strand comprises at least 15 contiguous nucleotides from a first strand of: AD-38162.1 (SEQ ID NO: 574), or a modified or unmodified variant thereof.

[0977] A RNAi agent comprising a first strand and a second strand, wherein the first strand comprises at least 15 contiguous nucleotides from a first strand of: AD-38168.1 (SEQ ID NO: 575), or a modified or unmodified variant thereof.

[0978] A RNAi agent comprising a first strand and a second strand, wherein the first strand comprises at least 15 contiguous nucleotides from a first strand of: AD-38174.1 (SEQ ID NO: 576), or a modified or unmodified variant thereof.

[0979] A RNAi agent comprising a first strand and a second strand, wherein the first strand comprises at least 15 contiguous nucleotides from a first strand of: AD-39683.1 (SEQ ID NO: 577), or a modified or unmodified variant thereof.

[0980] A RNAi agent comprising a first strand and a second strand, wherein the first strand comprises at least 15 contiguous nucleotides from a first strand of: AD-39689.1 (SEQ ID NO: 578), or a modified or unmodified variant thereof.

[0981] A RNAi agent comprising a first strand and a second strand, wherein the first strand comprises at least 15 contiguous nucleotides from a first strand of: AD-39695.1 (SEQ ID NO: 579), or a modified or unmodified variant thereof.

[0982] A RNAi agent comprising a first strand and a second strand, wherein the first strand comprises at least 15 contiguous nucleotides from a first strand of: AD-39701.1 (SEQ ID NO: 580), or a modified or unmodified variant thereof.

[0983] A RNAi agent comprising a first strand and a second strand, wherein the first strand comprises at least 15 contiguous nucleotides from a first strand of: AD-39707.1 (SEQ ID NO: 581), or a modified or unmodified variant thereof.

[0984] A RNAi agent comprising a first strand and a second strand, wherein the first strand comprises at least 15 contiguous nucleotides from a first strand of: AD-39713.1 (SEQ ID NO: 582), or a modified or unmodified variant thereof.

[0985] A RNAi agent comprising a first strand and a second strand, wherein the first strand comprises at least 15 contiguous nucleotides from a first strand of: AD-39719.1 (SEQ ID NO: 583), or a modified or unmodified variant thereof.

[0986] A RNAi agent comprising a first strand and a second strand, wherein the first strand comprises at least 15 contiguous nucleotides from a first strand of: AD-39725.1 (SEQ ID NO: 584),

[0987] A RNAi agent comprising a first strand and a second strand, wherein the first strand comprises at least 15 contiguous nucleotides from a first strand of: AD-39684.1 (SEQ ID NO: 585), or a modified or unmodified variant thereof.

[0988] A RNAi agent comprising a first strand and a second strand, wherein the first strand comprises at least 15 contiguous nucleotides from a first strand of: AD-39690.1 (SEQ ID NO: 586), or a modified or unmodified variant thereof.

[0989] A RNAi agent comprising a first strand and a second strand, wherein the first strand comprises at least 15 contiguous nucleotides from a first strand of: AD-39696.1 (SEQ ID NO: 587), or a modified or unmodified variant thereof.

[0990] A RNAi agent comprising a first strand and a second strand, wherein the first strand comprises at least 15 contiguous nucleotides from a first strand of: AD-39702.1 (SEQ ID NO: 588), or a modified or unmodified variant thereof.

[0991] A RNAi agent comprising a first strand and a second strand, wherein the first strand comprises at least 15 contiguous nucleotides from a first strand of: AD-39708.1 (SEQ ID NO: 589), or a modified or unmodified variant thereof.

[0992] A RNAi agent comprising a first strand and a second strand, wherein the first strand comprises at least 15 contiguous nucleotides from a first strand of: AD-39714.1 (SEQ ID NO: 590), or a modified or unmodified variant thereof.

[0993] A RNAi agent comprising a first strand and a second strand, wherein the first strand comprises at least 15 contiguous nucleotides from a first strand of: AD-39720.1 (SEQ ID NO: 591), or a modified or unmodified variant thereof.

[0994] A RNAi agent comprising a first strand and a second strand, wherein the first strand comprises at least 15 contiguous nucleotides from a first strand of: AD-39726.1 (SEQ ID NO: 592), or a modified or unmodified variant thereof.

[0995] A RNAi agent comprising a first strand and a second strand, wherein the first strand comprises at least 15 contiguous nucleotides from a first strand of: AD-39685.1 (SEQ ID NO: 593), or a modified or unmodified variant thereof.

[0996] A RNAi agent comprising a first strand and a second strand, wherein the first strand comprises at least 15 contiguous nucleotides from a first strand of: AD-39691.1 (SEQ ID NO: 594), or a modified or unmodified variant thereof.

[0997] A RNAi agent comprising a first strand and a second strand, wherein the first strand comprises at least 15 contiguous nucleotides from a first strand of: AD-39697.1 (SEQ ID NO: 595), or a modified or unmodified variant thereof.

[0998] A RNAi agent comprising a first strand and a second strand, wherein the first strand comprises at least 15 contiguous nucleotides from a first strand of: AD-39703.1 (SEQ ID NO: 596), or a modified or unmodified variant thereof.

[0999] A RNAi agent comprising a first strand and a second strand, wherein the first strand comprises at least 15 contiguous nucleotides from a first strand of: AD-39709.1 (SEQ ID NO: 597), or a modified or unmodified variant thereof.

[1000] A RNAi agent comprising a first strand and a second strand, wherein the first strand comprises at least 15 contiguous nucleotides from a first strand of: AD-39715.1 (SEQ ID NO: 598), or a modified or unmodified variant thereof.

[1001] A RNAi agent comprising a first strand and a second strand, wherein the first strand comprises at least 15 contiguous nucleotides from a first strand of: AD-39721.1 (SEQ ID NO: 599), or a modified or unmodified variant thereof.

[1002] A RNAi agent comprising a first strand and a second strand, wherein the first strand comprises at least 15 contiguous nucleotides from a first strand of: AD-39727.1 (SEQ ID NO: 600), or a modified or unmodified variant thereof.

[1003] A RNAi agent comprising a first strand and a second strand, wherein the first strand comprises at least 15 contiguous nucleotides from a first strand of: AD-39686.1 (SEQ ID NO: 601), or a modified or unmodified variant thereof.

[1004] A RNAi agent comprising a first strand and a second strand, wherein the first strand comprises at least 15 contiguous nucleotides from a first strand of: AD-39692.1 (SEQ ID NO: 602), or a modified or unmodified variant thereof.

[1005] A RNAi agent comprising a first strand and a second strand, wherein the first strand comprises at least 15 contiguous nucleotides from a first strand of: AD-39698.1 (SEQ ID NO: 603), or a modified or unmodified variant thereof.

[1006] A RNAi agent comprising a first strand and a second strand, wherein the first strand comprises at least 15 contiguous nucleotides from a first strand of: AD-39704.1 (SEQ ID NO: 604), or a modified or unmodified variant thereof.

[1007] A RNAi agent comprising a first strand and a second strand, wherein the first strand comprises at least 15 contiguous nucleotides from a first strand of: AD-39710.1 (SEQ ID NO: 605), or a modified or unmodified variant thereof.

[1008] A RNAi agent comprising a first strand and a second strand, wherein the first strand comprises at least 15 contiguous nucleotides from a first strand of: AD-39716.1 (SEQ ID NO: 606), or a modified or unmodified variant thereof.

[1009] A RNAi agent comprising a first strand and a second strand, wherein the first strand comprises at least 15 contiguous nucleotides from a first strand of: AD-39722.1 (SEQ ID NO: 607), or a modified or unmodified variant thereof.

[1010] A RNAi agent comprising a first strand and a second strand, wherein the first strand comprises at least 15 contiguous nucleotides from a first strand of: AD-39728.1 (SEQ ID NO: 608), or a modified or unmodified variant thereof.

[1011] A RNAi agent comprising a first strand and a second strand, wherein the first strand comprises at least 15 contiguous nucleotides from a first strand of: AD-39687.1 (SEQ ID NO: 609), or a modified or unmodified variant thereof.

[1012] A RNAi agent comprising a first strand and a second strand, wherein the first strand comprises at least 15 contiguous nucleotides from a first strand of: AD-39693.1 (SEQ ID NO: 610), or a modified or unmodified variant thereof.

[1013] A RNAi agent comprising a first strand and a second strand, wherein the first strand comprises at least 15 contiguous nucleotides from a first strand of: AD-39699.1 (SEQ ID NO: 611), or a modified or unmodified variant thereof.

[1014] A RNAi agent comprising a first strand and a second strand, wherein the first strand comprises at least 15 contiguous nucleotides from a first strand of: AD-39705.1 (SEQ ID NO: 612), or a modified or unmodified variant thereof.

[1015] A RNAi agent comprising a first strand and a second strand, wherein the first strand comprises at least 15 contiguous nucleotides from a first strand of: AD-39711.1 (SEQ ID NO: 613), or a modified or unmodified variant thereof.

[1016] A RNAi agent comprising a first strand and a second strand, wherein the first strand comprises at least 15 contiguous nucleotides from a first strand of: AD-39717.1 (SEQ ID NO: 614), or a modified or unmodified variant thereof.

[1017] A RNAi agent comprising a first strand and a second strand, wherein the first strand comprises at least 15 contiguous nucleotides from a first strand of: AD-39723.1 (SEQ ID NO: 615), or a modified or unmodified variant thereof.

[1018] A RNAi agent comprising a first strand and a second strand, wherein the first strand comprises at least 15 contiguous nucleotides from a first strand of: AD-39729.1 (SEQ ID NO: 616), or a modified or unmodified variant thereof.

[1019] A RNAi agent comprising a first strand and a second strand, wherein the first strand comprises at least 15 contiguous nucleotides from a first strand of: AD-39688.1 (SEQ ID NO: 617), or a modified or unmodified variant thereof.

[1020] A RNAi agent comprising a first strand and a second strand, wherein the first strand comprises at least 15 contiguous nucleotides from a first strand of: AD-39694.1 (SEQ ID NO: 618), or a modified or unmodified variant thereof.

[1021] A RNAi agent comprising a first strand and a second strand, wherein the first strand comprises at least 15 contiguous nucleotides from a first strand of: AD-39700.1 (SEQ ID NO: 619), or a modified or unmodified variant thereof.

[1022] A RNAi agent comprising a first strand and a second strand, wherein the first strand comprises at least 15 contiguous nucleotides from a first strand of: AD-39706.1 (SEQ ID NO: 620), or a modified or unmodified variant thereof.

[1023] A RNAi agent comprising a first strand and a second strand, wherein the first strand comprises at least 15 contiguous nucleotides from a first strand of: AD-39712.1 (SEQ ID NO: 621), or a modified or unmodified variant thereof.

[1024] A RNAi agent comprising a first strand and a second strand, wherein the first strand comprises at least 15 contiguous nucleotides from a first strand of: AD-39718.1 (SEQ ID NO: 622), or a modified or unmodified variant thereof.

[1025] A RNAi agent comprising a first strand and a second strand, wherein the first strand comprises at least 15 contiguous nucleotides from a first strand of: AD-39724.1 (SEQ ID NO: 623), or a modified or unmodified variant thereof.

[1026] A RNAi agent comprising a first strand and a second strand, wherein the first strand comprises at least 15 contiguous nucleotides from a first strand of: AD-39730.1 (SEQ ID NO: 624), or a modified or unmodified variant thereof.

[1027] A RNAi agent comprising a first strand and a second strand, wherein the first strand comprises at least 15 contiguous nucleotides from a first strand of: AD-39736.1 (SEQ ID NO: 625),

[1028] A RNAi agent comprising a first strand and a second strand, wherein the first strand comprises at least 15 contiguous nucleotides from a first strand of: AD-39742.1 (SEQ ID NO: 626), or a modified or unmodified variant thereof.

[1029] A RNAi agent comprising a first strand and a second strand, wherein the first strand comprises at least 15 contiguous nucleotides from a first strand of: AD-39748.1 (SEQ ID NO: 627), or a modified or unmodified variant thereof.

[1030] A RNAi agent comprising a first strand and a second strand, wherein the first strand comprises at least 15 contiguous nucleotides from a first strand of: AD-39754.1 (SEQ ID NO: 628), or a modified or unmodified variant thereof.

[1031] A RNAi agent comprising a first strand and a second strand, wherein the first strand comprises at least 15 contiguous nucleotides from a first strand of: AD-39760.1 (SEQ ID NO: 629), or a modified or unmodified variant thereof.

[1032] A RNAi agent comprising a first strand and a second strand, wherein the first strand comprises at least 15 contiguous nucleotides from a first strand of: AD-39766.1 (SEQ ID NO: 630), or a modified or unmodified variant thereof.

[1033] A RNAi agent comprising a first strand and a second strand, wherein the first strand comprises at least 15 contiguous nucleotides from a first strand of: AD-39772.1 (SEQ ID NO: 631), or a modified or unmodified variant thereof.

[1034] A RNAi agent comprising a first strand and a second strand, wherein the first strand comprises at least 15 contiguous nucleotides from a first strand of: AD-39731.1 (SEQ ID NO: 632), or a modified or unmodified variant thereof.

[1035] A RNAi agent comprising a first strand and a second strand, wherein the first strand comprises at least 15 contiguous nucleotides from a first strand of: AD-39737.1 (SEQ ID NO: 633), or a modified or unmodified variant thereof.

[1036] A RNAi agent comprising a first strand and a second strand, wherein the first strand comprises at least 15 contiguous nucleotides from a first strand of: AD-39743.1 (SEQ ID NO: 634), or a modified or unmodified variant thereof.

[1037] A RNAi agent comprising a first strand and a second strand, wherein the first strand comprises at least 15 contiguous nucleotides from a first strand of: AD-39749.1 (SEQ ID NO: 635), or a modified or unmodified variant thereof.

[1038] A RNAi agent comprising a first strand and a second strand, wherein the first strand comprises at least 15 contiguous nucleotides from a first strand of: AD-39755.1 (SEQ ID NO: 636), or a modified or unmodified variant thereof.

[1039] A RNAi agent comprising a first strand and a second strand, wherein the first strand comprises at least 15 contiguous nucleotides from a first strand of: AD-39761.1 (SEQ ID NO: 637), or a modified or unmodified variant thereof.

[1040] A RNAi agent comprising a first strand and a second strand, wherein the first strand comprises at least 15 contiguous nucleotides from a first strand of: AD-39767.1 (SEQ ID NO: 638), or a modified or unmodified variant thereof.

[1041] A RNAi agent comprising a first strand and a second strand, wherein the first strand comprises at least 15 contiguous nucleotides from a first strand of: AD-39773.1 (SEQ ID NO: 639), or a modified or unmodified variant thereof.

[1042] A RNAi agent comprising a first strand and a second strand, wherein the first strand comprises at least 15 contiguous nucleotides from a first strand of: AD-39732.1 (SEQ ID NO: 640), or a modified or unmodified variant thereof.

[1043] A RNAi agent comprising a first strand and a second strand, wherein the first strand comprises at least 15 contiguous nucleotides from a first strand of: AD-39738.1 (SEQ ID NO: 641), or a modified or unmodified variant thereof.

[1044] A RNAi agent comprising a first strand and a second strand, wherein the first strand comprises at least 15 contiguous nucleotides from a first strand of: AD-39744.1 (SEQ ID NO: 642), or a modified or unmodified variant thereof.

[1045] A RNAi agent comprising a first strand and a second strand, wherein the first strand comprises at least 15 contiguous nucleotides from a first strand of: AD-39750.1 (SEQ ID NO: 643), or a modified or unmodified variant thereof.

[1046] A RNAi agent comprising a first strand and a second strand, wherein the first strand comprises at least 15 contiguous nucleotides from a first strand of: AD-39756.1 (SEQ ID NO: 644), or a modified or unmodified variant thereof.

[1047] A RNAi agent comprising a first strand and a second strand, wherein the first strand comprises at least 15 contiguous nucleotides from a first strand of: AD-39762.1 (SEQ ID NO: 645), or a modified or unmodified variant thereof.

[1048] A RNAi agent comprising a first strand and a second strand, wherein the first strand comprises at least 15 contiguous nucleotides from a first strand of: AD-39768.1 (SEQ ID NO: 646), or a modified or unmodified variant thereof.

[1049] A RNAi agent comprising a first strand and a second strand, wherein the first strand comprises at least 15 contiguous nucleotides from a first strand of: AD-39774.1 (SEQ ID NO: 647), or a modified or unmodified variant thereof.

[1050] A RNAi agent comprising a first strand and a second strand, wherein the first strand comprises at least 15 contiguous nucleotides from a first strand of: AD-39733.1 (SEQ ID NO: 648), or a modified or unmodified variant thereof.

[1051] A RNAi agent comprising a first strand and a second strand, wherein the first strand comprises at least 15 contiguous nucleotides from a first strand of: AD-39739.1 (SEQ ID NO: 649), or a modified or unmodified variant thereof.

[1052] A RNAi agent comprising a first strand and a second strand, wherein the first strand comprises at least 15 contiguous nucleotides from a first strand of: AD-39745.1 (SEQ ID NO: 650), or a modified or unmodified variant thereof.

[1053] A RNAi agent comprising a first strand and a second strand, wherein the first strand comprises at least 15 contiguous nucleotides from a first strand of: AD-39751.1 (SEQ ID NO: 651), or a modified or unmodified variant thereof.

[1054] A RNAi agent comprising a first strand and a second strand, wherein the first strand comprises at least 15 contiguous nucleotides from a first strand of: AD-39757.1 (SEQ ID NO: 652), or a modified or unmodified variant thereof.

[1055] A RNAi agent comprising a first strand and a second strand, wherein the first strand comprises at least 15 contiguous nucleotides from a first strand of: AD-39763.1 (SEQ ID NO: 653), or a modified or unmodified variant thereof.

[1056] A RNAi agent comprising a first strand and a second strand, wherein the first strand comprises at least 15 contiguous nucleotides from a first strand of: AD-39769.1 (SEQ ID NO: 654), or a modified or unmodified variant thereof.

[1057] A RNAi agent comprising a first strand and a second strand, wherein the first strand comprises at least 15 contiguous nucleotides from a first strand of: AD-39775.1 (SEQ ID NO: 655), or a modified or unmodified variant thereof.

[1058] A RNAi agent comprising a first strand and a second strand, wherein the first strand comprises at least 15 contiguous nucleotides from a first strand of: AD-39734.1 (SEQ ID NO: 656), or a modified or unmodified variant thereof.

[1059] A RNAi agent comprising a first strand and a second strand, wherein the first strand comprises at least 15 contiguous nucleotides from a first strand of: AD-39740.1 (SEQ ID NO: 657), or a modified or unmodified variant thereof.

[1060] A RNAi agent comprising a first strand and a second strand, wherein the first strand comprises at least 15 contiguous nucleotides from a first strand of: AD-39746.1 (SEQ ID NO: 658), or a modified or unmodified variant thereof.

[1061] A RNAi agent comprising a first strand and a second strand, wherein the first strand comprises at least 15 contiguous nucleotides from a first strand of: AD-39752.1 (SEQ ID NO: 659), or a modified or unmodified variant thereof.

[1062] A RNAi agent comprising a first strand and a second strand, wherein the first strand comprises at least 15 contiguous nucleotides from a first strand of: AD-39758.1 (SEQ ID NO: 660), or a modified or unmodified variant thereof.

[1063] A RNAi agent comprising a first strand and a second strand, wherein the first strand comprises at least 15 contiguous nucleotides from a first strand of: AD-39764.1 (SEQ ID NO: 661), or a modified or unmodified variant thereof.

[1064] A RNAi agent comprising a first strand and a second strand, wherein the first strand comprises at least 15 contiguous nucleotides from a first strand of: AD-39770.1 (SEQ ID NO: 662), or a modified or unmodified variant thereof.

[1065] A RNAi agent comprising a first strand and a second strand, wherein the first strand comprises at least 15 contiguous nucleotides from a first strand of: AD-39776.1 (SEQ ID NO: 663), or a modified or unmodified variant thereof.

[1066] A RNAi agent comprising a first strand and a second strand, wherein the first strand comprises at least 15 contiguous nucleotides from a first strand of: AD-39735.1 (SEQ ID NO: 664), or a modified or unmodified variant thereof.

[1067] A RNAi agent comprising a first strand and a second strand, wherein the first strand comprises at least 15 contiguous nucleotides from a first strand of: AD-39741.1 (SEQ ID NO: 665), or a modified or unmodified variant thereof.

[1068] A RNAi agent comprising a first strand and a second strand, wherein the first strand comprises at least 15 contiguous nucleotides from a first strand of: AD-39747.1 (SEQ ID NO: 666),

[1069] A RNAi agent comprising a first strand and a second strand, wherein the first strand comprises at least 15 contiguous nucleotides from a first strand of: AD-39753.1 (SEQ ID NO: 667), or a modified or unmodified variant thereof.

[1070] A RNAi agent comprising a first strand and a second strand, wherein the first strand comprises at least 15 contiguous nucleotides from a first strand of: AD-39759.1 (SEQ ID NO: 668), or a modified or unmodified variant thereof.

[1071] A RNAi agent comprising a first strand and a second strand, wherein the first strand comprises at least 15 contiguous nucleotides from a first strand of: AD-39765.1 (SEQ ID NO: 669), or a modified or unmodified variant thereof.

[1072] A RNAi agent comprising a first strand and a second strand, wherein the first strand comprises at least 15 contiguous nucleotides from a first strand of: AD-39771.1 (SEQ ID NO: 670), or a modified or unmodified variant thereof.

[1073] A RNAi agent comprising a first strand and a second strand, wherein the first strand comprises at least 15 contiguous nucleotides from a first strand of: AD-39778.1 (SEQ ID NO: 671), or a modified or unmodified variant thereof.

[1074] A RNAi agent comprising a first strand and a second strand, wherein the first strand comprises at least 15 contiguous nucleotides from a first strand of: AD-39784.1 (SEQ ID NO: 672), or a modified or unmodified variant thereof.

[1075] A RNAi agent comprising a first strand and a second strand, wherein the first strand comprises at least 15 contiguous nucleotides from a first strand of: AD-39790.1 (SEQ ID NO: 673), or a modified or unmodified variant thereof.

[1076] A RNAi agent comprising a first strand and a second strand, wherein the first strand comprises at least 15 contiguous nucleotides from a first strand of: AD-39796.1 (SEQ ID NO: 674), or a modified or unmodified variant thereof.

[1077] A RNAi agent comprising a first strand and a second strand, wherein the first strand comprises at least 15 contiguous nucleotides from a first strand of: AD-39802.1 (SEQ ID NO: 675), or a modified or unmodified variant thereof.

[1078] A RNAi agent comprising a first strand and a second strand, wherein the first strand comprises at least 15 contiguous nucleotides from a first strand of: AD-39808.1 (SEQ ID NO: 676), or a modified or unmodified variant thereof.

[1079] A RNAi agent comprising a first strand and a second strand, wherein the first strand comprises at least 15 contiguous nucleotides from a first strand of: AD-39814.1 (SEQ ID NO: 677), or a modified or unmodified variant thereof.

[1080] A RNAi agent comprising a first strand and a second strand, wherein the first strand comprises at least 15 contiguous nucleotides from a first strand of: AD-39820.1 (SEQ ID NO: 678), or a modified or unmodified variant thereof.

[1081] A RNAi agent comprising a first strand and a second strand, wherein the first strand comprises at least 15 contiguous nucleotides from a first strand of: AD-39779.1 (SEQ ID NO: 679), or a modified or unmodified variant thereof.

[1082] A RNAi agent comprising a first strand and a second strand, wherein the first strand comprises at least 15 contiguous nucleotides from a first strand of: AD-39785.1 (SEQ ID NO: 680), or a modified or unmodified variant thereof.

[1083] A RNAi agent comprising a first strand and a second strand, wherein the first strand comprises at least 15 contiguous nucleotides from a first strand of: AD-39791.1 (SEQ ID NO: 681), or a modified or unmodified variant thereof.

[1084] A RNAi agent comprising a first strand and a second strand, wherein the first strand comprises at least 15 contiguous nucleotides from a first strand of: AD-39797.1 (SEQ ID NO: 682), or a modified or unmodified variant thereof.

[1085] A RNAi agent comprising a first strand and a second strand, wherein the first strand comprises at least 15 contiguous nucleotides from a first strand of: AD-39803.1 (SEQ ID NO: 683), or a modified or unmodified variant thereof.

[1086] A RNAi agent comprising a first strand and a second strand, wherein the first strand comprises at least 15 contiguous nucleotides from a first strand of: AD-39809.1 (SEQ ID NO: 684), or a modified or unmodified variant thereof.

[1087] A RNAi agent comprising a first strand and a second strand, wherein the first strand comprises at least 15 contiguous nucleotides from a first strand of: AD-39815.1 (SEQ ID NO: 685), or a modified or unmodified variant thereof.

[1088] A RNAi agent comprising a first strand and a second strand, wherein the first strand comprises at least 15 contiguous nucleotides from a first strand of: AD-39821.1 (SEQ ID NO: 686), or a modified or unmodified variant thereof.

[1089] A RNAi agent comprising a first strand and a second strand, wherein the first strand comprises at least 15 contiguous nucleotides from a first strand of: AD-39780.1 (SEQ ID NO: 687), or a modified or unmodified variant thereof.

[1090] A RNAi agent comprising a first strand and a second strand, wherein the first strand comprises at least 15 contiguous nucleotides from a first strand of: AD-39786.1 (SEQ ID NO: 688), or a modified or unmodified variant thereof.

[1091] A RNAi agent comprising a first strand and a second strand, wherein the first strand comprises at least 15 contiguous nucleotides from a first strand of: AD-39792.1 (SEQ ID NO: 689), or a modified or unmodified variant thereof.

[1092] A RNAi agent comprising a first strand and a second strand, wherein the first strand comprises at least 15 contiguous nucleotides from a first strand of: AD-39798.1 (SEQ ID NO: 690), or a modified or unmodified variant thereof.

[1093] A RNAi agent comprising a first strand and a second strand, wherein the first strand comprises at least 15 contiguous nucleotides from a first strand of: AD-39804.1 (SEQ ID NO: 691), or a modified or unmodified variant thereof.

[1094] A RNAi agent comprising a first strand and a second strand, wherein the first strand comprises at least 15 contiguous nucleotides from a first strand of: AD-39810.1 (SEQ ID NO: 692), or a modified or unmodified variant thereof.

[1095] A RNAi agent comprising a first strand and a second strand, wherein the first strand comprises at least 15 contiguous nucleotides from a first strand of: AD-39816.1 (SEQ ID NO: 693), or a modified or unmodified variant thereof.

[1096] A RNAi agent comprising a first strand and a second strand, wherein the first strand comprises at least 15 contiguous nucleotides from a first strand of: AD-39822.1 (SEQ ID NO: 694), or a modified or unmodified variant thereof.

[1097] A RNAi agent comprising a first strand and a second strand, wherein the first strand comprises at least 15 contiguous nucleotides from a first strand of: AD-39781.1 (SEQ ID NO: 695), or a modified or unmodified variant thereof.

[1098] A RNAi agent comprising a first strand and a second strand, wherein the first strand comprises at least 15 contiguous nucleotides from a first strand of: AD-39787.1 (SEQ ID NO: 696), or a modified or unmodified variant thereof.

[1099] A RNAi agent comprising a first strand and a second strand, wherein the first strand comprises at least 15 contiguous nucleotides from a first strand of: AD-39793.1 (SEQ ID NO: 697), or a modified or unmodified variant thereof.

[1100] A RNAi agent comprising a first strand and a second strand, wherein the first strand comprises at least 15 contiguous nucleotides from a first strand of: AD-39799.1 (SEQ ID NO: 698), or a modified or unmodified variant thereof.

[1101] A RNAi agent comprising a first strand and a second strand, wherein the first strand comprises at least 15 contiguous nucleotides from a first strand of: AD-39805.1 (SEQ ID NO: 699), or a modified or unmodified variant thereof.

[1102] A RNAi agent comprising a first strand and a second strand, wherein the first strand comprises at least 15 contiguous nucleotides from a first strand of: AD-39811.1 (SEQ ID NO: 700), or a modified or unmodified variant thereof.

[1103] A RNAi agent comprising a first strand and a second strand, wherein the first strand comprises at least 15 contiguous nucleotides from a first strand of: AD-39817.1 (SEQ ID NO: 701), or a modified or unmodified variant thereof.

[1104] A RNAi agent comprising a first strand and a second strand, wherein the first strand comprises at least 15 contiguous nucleotides from a first strand of: AD-39823.1 (SEQ ID NO: 702), or a modified or unmodified variant thereof.

[1105] A RNAi agent comprising a first strand and a second strand, wherein the first strand comprises at least 15 contiguous nucleotides from a first strand of: AD-39782.1 (SEQ ID NO: 703), or a modified or unmodified variant thereof.

[1106] A RNAi agent comprising a first strand and a second strand, wherein the first strand comprises at least 15 contiguous nucleotides from a first strand of: AD-39788.1 (SEQ ID NO: 704), or a modified or unmodified variant thereof.

[1107] A RNAi agent comprising a first strand and a second strand, wherein the first strand comprises at least 15 contiguous nucleotides from a first strand of: AD-39794.1 (SEQ ID NO: 705), or a modified or unmodified variant thereof.

[1108] A RNAi agent comprising a first strand and a second strand, wherein the first strand comprises at least 15 contiguous nucleotides from a first strand of: AD-39800.1 (SEQ ID NO: 706), or a modified or unmodified variant thereof.

[1109] A RNAi agent comprising a first strand and a second strand, wherein the first strand comprises at least 15 contiguous nucleotides from a first strand of: AD-39806.1 (SEQ ID NO: 707),

[1110] A RNAi agent comprising a first strand and a second strand, wherein the first strand comprises at least 15 contiguous nucleotides from a first strand of: AD-39812.1 (SEQ ID NO: 708), or a modified or unmodified variant thereof.

[1111] A RNAi agent comprising a first strand and a second strand, wherein the first strand comprises at least 15 contiguous nucleotides from a first strand of: AD-39818.1 (SEQ ID NO: 709), or a modified or unmodified variant thereof.

[1112] A RNAi agent comprising a first strand and a second strand, wherein the first strand comprises at least 15 contiguous nucleotides from a first strand of: AD-39824.1 (SEQ ID NO: 710), or a modified or unmodified variant thereof.

[1113] A RNAi agent comprising a first strand and a second strand, wherein the first strand comprises at least 15 contiguous nucleotides from a first strand of: AD-39783.1 (SEQ ID NO: 711), or a modified or unmodified variant thereof.

[1114] A RNAi agent comprising a first strand and a second strand, wherein the first strand comprises at least 15 contiguous nucleotides from a first strand of: AD-39789.1 (SEQ ID NO: 712), or a modified or unmodified variant thereof.

[1115] A RNAi agent comprising a first strand and a second strand, wherein the first strand comprises at least 15 contiguous nucleotides from a first strand of: AD-39795.1 (SEQ ID NO: 713), or a modified or unmodified variant thereof.

[1116] A RNAi agent comprising a first strand and a second strand, wherein the first strand comprises at least 15 contiguous nucleotides from a first strand of: AD-39801.1 (SEQ ID NO: 714), or a modified or unmodified variant thereof.

[1117] A RNAi agent comprising a first strand and a second strand, wherein the first strand comprises at least 15 contiguous nucleotides from a first strand of: AD-39807.1 (SEQ ID NO: 715), or a modified or unmodified variant thereof.

[1118] A RNAi agent comprising a first strand and a second strand, wherein the first strand comprises at least 15 contiguous nucleotides from a first strand of: AD-39813.1 (SEQ ID NO: 716), or a modified or unmodified variant thereof.

[1119] A RNAi agent comprising a first strand and a second strand, wherein the first strand comprises at least 15 contiguous nucleotides from a first strand of: AD-39819.1 (SEQ ID NO: 717), or a modified or unmodified variant thereof.

[1120] A RNAi agent comprising a first strand and a second strand, wherein the first strand comprises at least 15 contiguous nucleotides from a first strand of: AD-39825.1 (SEQ ID NO: 718), or a modified or unmodified variant thereof.

[1121] A RNAi agent comprising a first strand and a second strand, wherein the first strand comprises at least 15 contiguous nucleotides from a first strand of: AD-39831.1 (SEQ ID NO: 719), or a modified or unmodified variant thereof.

[1122] A RNAi agent comprising a first strand and a second strand, wherein the first strand comprises at least 15 contiguous nucleotides from a first strand of: AD-39837.1 (SEQ ID NO: 720), or a modified or unmodified variant thereof.

[1123] A RNAi agent comprising a first strand and a second strand, wherein the first strand comprises at least 15 contiguous nucleotides from a first strand of: AD-39843.1 (SEQ ID NO: 721), or a modified or unmodified variant thereof.

[1124] A RNAi agent comprising a first strand and a second strand, wherein the first strand comprises at least 15 contiguous nucleotides from a first strand of: AD-39849.1 (SEQ ID NO: 722), or a modified or unmodified variant thereof.

[1125] A RNAi agent comprising a first strand and a second strand, wherein the first strand comprises at least 15 contiguous nucleotides from a first strand of: AD-39855.1 (SEQ ID NO: 723), or a modified or unmodified variant thereof.

[1126] A RNAi agent comprising a first strand and a second strand, wherein the first strand comprises at least 15 contiguous nucleotides from a first strand of: AD-39861.1 (SEQ ID NO: 724), or a modified or unmodified variant thereof.

[1127] A RNAi agent comprising a first strand and a second strand, wherein the first strand comprises at least 15 contiguous nucleotides from a first strand of: AD-39867.1 (SEQ ID NO: 725), or a modified or unmodified variant thereof.

[1128] A RNAi agent comprising a first strand and a second strand, wherein the first strand comprises at least 15 contiguous nucleotides from a first strand of: AD-39826.1 (SEQ ID NO: 726), or a modified or unmodified variant thereof.

[1129] A RNAi agent comprising a first strand and a second strand, wherein the first strand comprises at least 15 contiguous nucleotides from a first strand of: AD-39832.1 (SEQ ID NO: 727), or a modified or unmodified variant thereof.

[1130] A RNAi agent comprising a first strand and a second strand, wherein the first strand comprises at least 15 contiguous nucleotides from a first strand of: AD-39838.1 (SEQ ID NO: 728), or a modified or unmodified variant thereof.

[1131] A RNAi agent comprising a first strand and a second strand, wherein the first strand comprises at least 15 contiguous nucleotides from a first strand of: AD-39844.1 (SEQ ID NO: 729), or a modified or unmodified variant thereof.

[1132] A RNAi agent comprising a first strand and a second strand, wherein the first strand comprises at least 15 contiguous nucleotides from a first strand of: AD-39850.1 (SEQ ID NO: 730), or a modified or unmodified variant thereof.

[1133] A RNAi agent comprising a first strand and a second strand, wherein the first strand comprises at least 15 contiguous nucleotides from a first strand of: AD-39856.1 (SEQ ID NO: 731), or a modified or unmodified variant thereof.

[1134] A RNAi agent comprising a first strand and a second strand, wherein the first strand comprises at least 15 contiguous nucleotides from a first strand of: AD-39862.1 (SEQ ID NO: 732), or a modified or unmodified variant thereof.

[1135] A RNAi agent comprising a first strand and a second strand, wherein the first strand comprises at least 15 contiguous nucleotides from a first strand of: AD-39868.1 (SEQ ID NO: 733), or a modified or unmodified variant thereof.

[1136] A RNAi agent comprising a first strand and a second strand, wherein the first strand comprises at least 15 contiguous nucleotides from a first strand of: AD-39827.1 (SEQ ID NO: 734), or a modified or unmodified variant thereof.

[1137] A RNAi agent comprising a first strand and a second strand, wherein the first strand comprises at least 15 contiguous nucleotides from a first strand of: AD-39833.1 (SEQ ID NO: 735), or a modified or unmodified variant thereof.

[1138] A RNAi agent comprising a first strand and a second strand, wherein the first strand comprises at least 15 contiguous nucleotides from a first strand of: AD-39839.1 (SEQ ID NO: 736), or a modified or unmodified variant thereof.

[1139] A RNAi agent comprising a first strand and a second strand, wherein the first strand comprises at least 15 contiguous nucleotides from a first strand of: AD-39845.1 (SEQ ID NO: 737), or a modified or unmodified variant thereof.

[1140] A RNAi agent comprising a first strand and a second strand, wherein the first strand comprises at least 15 contiguous nucleotides from a first strand of: AD-39851.1 (SEQ ID NO: 738), or a modified or unmodified variant thereof.

[1141] A RNAi agent comprising a first strand and a second strand, wherein the first strand comprises at least 15 contiguous nucleotides from a first strand of: AD-39857.1 (SEQ ID NO: 739), or a modified or unmodified variant thereof.

[1142] A RNAi agent comprising a first strand and a second strand, wherein the first strand comprises at least 15 contiguous nucleotides from a first strand of: AD-39863.1 (SEQ ID NO: 740), or a modified or unmodified variant thereof.

[1143] A RNAi agent comprising a first strand and a second strand, wherein the first strand comprises at least 15 contiguous nucleotides from a first strand of: AD-39869.1 (SEQ ID NO: 741), or a modified or unmodified variant thereof.

[1144] A RNAi agent comprising a first strand and a second strand, wherein the first strand comprises at least 15 contiguous nucleotides from a first strand of: AD-39828.1 (SEQ ID NO: 742), or a modified or unmodified variant thereof.

[1145] A RNAi agent comprising a first strand and a second strand, wherein the first strand comprises at least 15 contiguous nucleotides from a first strand of: AD-39834.1 (SEQ ID NO: 743), or a modified or unmodified variant thereof.

[1146] A RNAi agent comprising a first strand and a second strand, wherein the first strand comprises at least 15 contiguous nucleotides from a first strand of: AD-39840.1 (SEQ ID NO: 744), or a modified or unmodified variant thereof.

[1147] A RNAi agent comprising a first strand and a second strand, wherein the first strand comprises at least 15 contiguous nucleotides from a first strand of: AD-39846.1 (SEQ ID NO: 745), or a modified or unmodified variant thereof.

[1148] A RNAi agent comprising a first strand and a second strand, wherein the first strand comprises at least 15 contiguous nucleotides from a first strand of: AD-39852.1 (SEQ ID NO: 746), or a modified or unmodified variant thereof.

[1149] A RNAi agent comprising a first strand and a second strand, wherein the first strand comprises at least 15 contiguous nucleotides from a first strand of: AD-39858.1 (SEQ ID NO: 747), or a modified or unmodified variant thereof.

[1150] A RNAi agent comprising a first strand and a second strand, wherein the first strand comprises at least 15 contiguous nucleotides from a first strand of: AD-39864.1 (SEQ ID NO: 748),

[1151] A RNAi agent comprising a first strand and a second strand, wherein the first strand comprises at least 15 contiguous nucleotides from a first strand of: AD-39870.1 (SEQ ID NO: 749), or a modified or unmodified variant thereof.

[1152] A RNAi agent comprising a first strand and a second strand, wherein the first strand comprises at least 15 contiguous nucleotides from a first strand of: AD-39829.1 (SEQ ID NO: 750), or a modified or unmodified variant thereof.

[1153] A RNAi agent comprising a first strand and a second strand, wherein the first strand comprises at least 15 contiguous nucleotides from a first strand of: AD-39835.1 (SEQ ID NO: 751), or a modified or unmodified variant thereof.

[1154] A RNAi agent comprising a first strand and a second strand, wherein the first strand comprises at least 15 contiguous nucleotides from a first strand of: AD-39841.1 (SEQ ID NO: 752), or a modified or unmodified variant thereof.

[1155] A RNAi agent comprising a first strand and a second strand, wherein the first strand comprises at least 15 contiguous nucleotides from a first strand of: AD-39853.1 (SEQ ID NO: 753), or a modified or unmodified variant thereof.

[1156] A RNAi agent comprising a first strand and a second strand, wherein the first strand comprises at least 15 contiguous nucleotides from a first strand of: AD-39859.1 (SEQ ID NO: 754), or a modified or unmodified variant thereof.

[1157] A RNAi agent comprising a first strand and a second strand, wherein the first strand comprises at least 15 contiguous nucleotides from a first strand of: AD-39865.1 (SEQ ID NO: 755), or a modified or unmodified variant thereof.

[1158] A RNAi agent comprising a first strand and a second strand, wherein the first strand comprises at least 15 contiguous nucleotides from a first strand of: AD-39871.1 (SEQ ID NO: 756), or a modified or unmodified variant thereof.

[1159] A RNAi agent comprising a first strand and a second strand, wherein the first strand comprises at least 15 contiguous nucleotides from a first strand of: AD-39830.1 (SEQ ID NO: 757), or a modified or unmodified variant thereof.

[1160] A RNAi agent comprising a first strand and a second strand, wherein the first strand comprises at least 15 contiguous nucleotides from a first strand of: AD-39836.1 (SEQ ID NO: 758), or a modified or unmodified variant thereof.

[1161] A RNAi agent comprising a first strand and a second strand, wherein the first strand comprises at least 15 contiguous nucleotides from a first strand of: AD-39842.1 (SEQ ID NO: 759), or a modified or unmodified variant thereof.

[1162] A RNAi agent comprising a first strand and a second strand, wherein the first strand comprises at least 15 contiguous nucleotides from a first strand of: AD-39848.1 (SEQ ID NO: 760), or a modified or unmodified variant thereof.

[1163] A RNAi agent comprising a first strand and a second strand, wherein the first strand comprises at least 15 contiguous nucleotides from a first strand of: AD-39854.1 (SEQ ID NO: 761), or a modified or unmodified variant thereof.

[1164] A RNAi agent comprising a first strand and a second strand, wherein the first strand comprises at least 15 contiguous nucleotides from a first strand of: AD-39860.1 (SEQ ID NO: 762), or a modified or unmodified variant thereof.

[1165] A RNAi agent comprising a first strand and a second strand, wherein the first strand comprises at least 15 contiguous nucleotides from a first strand of: AD-39866.1 (SEQ ID NO: 763), or a modified or unmodified variant thereof.

[1166] A RNAi agent comprising a first strand and a second strand, wherein the first strand comprises at least 15 contiguous nucleotides from a first strand of: AD-39992.1 (SEQ ID NO: 764), or a modified or unmodified variant thereof.

[1167] A RNAi agent comprising a first strand and a second strand, wherein the first strand comprises at least 15 contiguous nucleotides from a first strand of: AD-39998.1 (SEQ ID NO: 765), or a modified or unmodified variant thereof.

[1168] A RNAi agent comprising a first strand and a second strand, wherein the first strand comprises at least 15 contiguous nucleotides from a first strand of: AD-40004.1 (SEQ ID NO: 766), or a modified or unmodified variant thereof.

[1169] A RNAi agent comprising a first strand and a second strand, wherein the first strand comprises at least 15 contiguous nucleotides from a first strand of: AD-40010.1 (SEQ ID NO: 767), or a modified or unmodified variant thereof.

[1170] A RNAi agent comprising a first strand and a second strand, wherein the first strand comprises at least 15 contiguous nucleotides from a first strand of: AD-40016.1 (SEQ ID NO: 768), or a modified or unmodified variant thereof.

[1171] A RNAi agent comprising a first strand and a second strand, wherein the first strand comprises at least 15 contiguous nucleotides from a first strand of: AD-40022.1 (SEQ ID NO: 769), or a modified or unmodified variant thereof.

[1172] A RNAi agent comprising a first strand and a second strand, wherein the first strand comprises at least 15 contiguous nucleotides from a first strand of: AD-40028.1 (SEQ ID NO: 770), or a modified or unmodified variant thereof.

[1173] A RNAi agent comprising a first strand and a second strand, wherein the first strand comprises at least 15 contiguous nucleotides from a first strand of: AD-40034.1 (SEQ ID NO: 771), or a modified or unmodified variant thereof.

[1174] A RNAi agent comprising a first strand and a second strand, wherein the first strand comprises at least 15 contiguous nucleotides from a first strand of: AD-39999.1 (SEQ ID NO: 772), or a modified or unmodified variant thereof.

[1175] A RNAi agent comprising a first strand and a second strand, wherein the first strand comprises at least 15 contiguous nucleotides from a first strand of: AD-40005.1 (SEQ ID NO: 773), or a modified or unmodified variant thereof.

[1176] A RNAi agent comprising a first strand and a second strand, wherein the first strand comprises at least 15 contiguous nucleotides from a first strand of: AD-40011.1 (SEQ ID NO: 774), or a modified or unmodified variant thereof.

[1177] A RNAi agent comprising a first strand and a second strand, wherein the first strand comprises at least 15 contiguous nucleotides from a first strand of: AD-40017.1 (SEQ ID NO: 775), or a modified or unmodified variant thereof.

[1178] A RNAi agent comprising a first strand and a second strand, wherein the first strand comprises at least 15 contiguous nucleotides from a first strand of: AD-40029.1 (SEQ ID NO: 776), or a modified or unmodified variant thereof.

[1179] A RNAi agent comprising a first strand and a second strand, wherein the first strand comprises at least 15 contiguous nucleotides from a first strand of: AD-40035.1 (SEQ ID NO: 777), or a modified or unmodified variant thereof.

[1180] A RNAi agent comprising a first strand and a second strand, wherein the first strand comprises at least 15 contiguous nucleotides from a first strand of: AD-39994.1 (SEQ ID NO: 778), or a modified or unmodified variant thereof.

[1181] A RNAi agent comprising a first strand and a second strand, wherein the first strand comprises at least 15 contiguous nucleotides from a first strand of: AD-40000.1 (SEQ ID NO: 779), or a modified or unmodified variant thereof.

[1182] A RNAi agent comprising a first strand and a second strand, wherein the first strand comprises at least 15 contiguous nucleotides from a first strand of: AD-40006.1 (SEQ ID NO: 780), or a modified or unmodified variant thereof.

[1183] A RNAi agent comprising a first strand and a second strand, wherein the first strand comprises at least 15 contiguous nucleotides from a first strand of: AD-40012.1 (SEQ ID NO: 781), or a modified or unmodified variant thereof.

[1184] A RNAi agent comprising a first strand and a second strand, wherein the first strand comprises at least 15 contiguous nucleotides from a first strand of: AD-40018.1 (SEQ ID NO: 782), or a modified or unmodified variant thereof.

[1185] A RNAi agent comprising a first strand and a second strand, wherein the first strand comprises at least 15 contiguous nucleotides from a first strand of: AD-40024.1 (SEQ ID NO: 783), or a modified or unmodified variant thereof.

[1186] A RNAi agent comprising a first strand and a second strand, wherein the first strand comprises at least 15 contiguous nucleotides from a first strand of: AD-40030.1 (SEQ ID NO: 784), or a modified or unmodified variant thereof.

[1187] A RNAi agent comprising a first strand and a second strand, wherein the first strand comprises at least 15 contiguous nucleotides from a first strand of: AD-40036.1 (SEQ ID NO: 785), or a modified or unmodified variant thereof.

[1188] A RNAi agent comprising a first strand and a second strand, wherein the first strand comprises at least 15 contiguous nucleotides from a first strand of: AD-39995.1 (SEQ ID NO: 786), or a modified or unmodified variant thereof.

[1189] A RNAi agent comprising a first strand and a second strand, wherein the first strand comprises at least 15 contiguous nucleotides from a first strand of: AD-40001.1 (SEQ ID NO: 787), or a modified or unmodified variant thereof.

[1190] A RNAi agent comprising a first strand and a second strand, wherein the first strand comprises at least 15 contiguous nucleotides from a first strand of: AD-40007.1 (SEQ ID NO: 788), or a modified or unmodified variant thereof.

[1191] A RNAi agent comprising a first strand and a second strand, wherein the first strand comprises at least 15 contiguous nucleotides from a first strand of: AD-40013.1 (SEQ ID NO: 789),

[1192] A RNAi agent comprising a first strand and a second strand, wherein the first strand comprises at least 15 contiguous nucleotides from a first strand of: AD-40019.1 (SEQ ID NO: 790), or a modified or unmodified variant thereof.

[1193] A RNAi agent comprising a first strand and a second strand, wherein the first strand comprises at least 15 contiguous nucleotides from a first strand of: AD-40025.1 (SEQ ID NO: 791), or a modified or unmodified variant thereof.

[1194] A RNAi agent comprising a first strand and a second strand, wherein the first strand comprises at least 15 contiguous nucleotides from a first strand of: AD-40031.1 (SEQ ID NO: 792), or a modified or unmodified variant thereof.

[1195] A RNAi agent comprising a first strand and a second strand, wherein the first strand comprises at least 15 contiguous nucleotides from a first strand of: AD-40037.1 (SEQ ID NO: 793), or a modified or unmodified variant thereof.

[1196] A RNAi agent comprising a first strand and a second strand, wherein the first strand comprises at least 15 contiguous nucleotides from a first strand of: AD-39996.1 (SEQ ID NO: 794), or a modified or unmodified variant thereof.

[1197] A RNAi agent comprising a first strand and a second strand, wherein the first strand comprises at least 15 contiguous nucleotides from a first strand of: AD-40002.1 (SEQ ID NO: 795), or a modified or unmodified variant thereof.

[1198] A RNAi agent comprising a first strand and a second strand, wherein the first strand comprises at least 15 contiguous nucleotides from a first strand of: AD-40008.1 (SEQ ID NO: 796), or a modified or unmodified variant thereof.

[1199] A RNAi agent comprising a first strand and a second strand, wherein the first strand comprises at least 15 contiguous nucleotides from a first strand of: AD-40014.1 (SEQ ID NO: 797), or a modified or unmodified variant thereof.

[1200] A RNAi agent comprising a first strand and a second strand, wherein the first strand comprises at least 15 contiguous nucleotides from a first strand of: AD-40020.1 (SEQ ID NO: 798), or a modified or unmodified variant thereof.

[1201] A RNAi agent comprising a first strand and a second strand, wherein the first strand comprises at least 15 contiguous nucleotides from a first strand of: AD-40026.1 (SEQ ID NO: 799), or a modified or unmodified variant thereof.

[1202] A RNAi agent comprising a first strand and a second strand, wherein the first strand comprises at least 15 contiguous nucleotides from a first strand of: AD-40032.1 (SEQ ID NO: 800), or a modified or unmodified variant thereof.

[1203] A RNAi agent comprising a first strand and a second strand, wherein the first strand comprises at least 15 contiguous nucleotides from a first strand of: AD-40038.1 (SEQ ID NO: 801), or a modified or unmodified variant thereof.

[1204] A RNAi agent comprising a first strand and a second strand, wherein the first strand comprises at least 15 contiguous nucleotides from a first strand of: AD-39997.1 (SEQ ID NO: 802), or a modified or unmodified variant thereof.

[1205] A RNAi agent comprising a first strand and a second strand, wherein the first strand comprises at least 15 contiguous nucleotides from a first strand of: AD-40009.1 (SEQ ID NO: 803), or a modified or unmodified variant thereof.

[1206] A RNAi agent comprising a first strand and a second strand, wherein the first strand comprises at least 15 contiguous nucleotides from a first strand of: AD-40015.1 (SEQ ID NO: 804), or a modified or unmodified variant thereof.

[1207] A RNAi agent comprising a first strand and a second strand, wherein the first strand comprises at least 15 contiguous nucleotides from a first strand of: AD-40021.1 (SEQ ID NO: 805), or a modified or unmodified variant thereof.

[1208] A RNAi agent comprising a first strand and a second strand, wherein the first strand comprises at least 15 contiguous nucleotides from a first strand of: AD-40027.1 (SEQ ID NO: 806), or a modified or unmodified variant thereof.

[1209] A RNAi agent comprising a first strand and a second strand, wherein the first strand comprises at least 15 contiguous nucleotides from a first strand of: AD-40033.1 (SEQ ID NO: 807), or a modified or unmodified variant thereof.

[1210] A RNAi agent comprising a first strand and a second strand, wherein the first strand comprises at least 15 contiguous nucleotides from a first strand of: AD-40039.1 (SEQ ID NO: 808), or a modified or unmodified variant thereof.

[1211] A RNAi agent comprising a first strand and a second strand, wherein the first strand comprises at least 15 contiguous nucleotides from a first strand of: AD-40045.1 (SEQ ID NO: 809), or a modified or unmodified variant thereof.

[1212] A RNAi agent comprising a first strand and a second strand, wherein the first strand comprises at least 15 contiguous nucleotides from a first strand of: AD-40051.1 (SEQ ID NO: 810), or a modified or unmodified variant thereof.

[1213] A RNAi agent comprising a first strand and a second strand, wherein the first strand comprises at least 15 contiguous nucleotides from a first strand of: AD-40057.1 (SEQ ID NO: 811), or a modified or unmodified variant thereof.

[1214] A RNAi agent comprising a first strand and a second strand, wherein the first strand comprises at least 15 contiguous nucleotides from a first strand of: AD-40063.1 (SEQ ID NO: 812), or a modified or unmodified variant thereof.

[1215] A RNAi agent comprising a first strand and a second strand, wherein the first strand comprises at least 15 contiguous nucleotides from a first strand of: AD-40069.1 (SEQ ID NO: 813), or a modified or unmodified variant thereof.

[1216] A RNAi agent comprising a first strand and a second strand, wherein the first strand comprises at least 15 contiguous nucleotides from a first strand of: AD-40075.1 (SEQ ID NO: 814), or a modified or unmodified variant thereof.

[1217] A RNAi agent comprising a first strand and a second strand, wherein the first strand comprises at least 15 contiguous nucleotides from a first strand of: AD-40081.1 (SEQ ID NO: 815), or a modified or unmodified variant thereof.

[1218] A RNAi agent comprising a first strand and a second strand, wherein the first strand comprises at least 15 contiguous nucleotides from a first strand of: AD-40040.1 (SEQ ID NO: 816), or a modified or unmodified variant thereof.

[1219] A RNAi agent comprising a first strand and a second strand, wherein the first strand comprises at least 15 contiguous nucleotides from a first strand of: AD-40046.1 (SEQ ID NO: 817), or a modified or unmodified variant thereof.

[1220] A RNAi agent comprising a first strand and a second strand, wherein the first strand comprises at least 15 contiguous nucleotides from a first strand of: AD-40052.1 (SEQ ID NO: 818), or a modified or unmodified variant thereof.

[1221] A RNAi agent comprising a first strand and a second strand, wherein the first strand comprises at least 15 contiguous nucleotides from a first strand of: AD-40058.1 (SEQ ID NO: 819), or a modified or unmodified variant thereof.

[1222] A RNAi agent comprising a first strand and a second strand, wherein the first strand comprises at least 15 contiguous nucleotides from a first strand of: AD-40064.1 (SEQ ID NO: 820), or a modified or unmodified variant thereof.

[1223] A RNAi agent comprising a first strand and a second strand, wherein the first strand comprises at least 15 contiguous nucleotides from a first strand of: AD-40070.1 (SEQ ID NO: 821), or a modified or unmodified variant thereof.

[1224] A RNAi agent comprising a first strand and a second strand, wherein the first strand comprises at least 15 contiguous nucleotides from a first strand of: AD-40076.1 (SEQ ID NO: 822), or a modified or unmodified variant thereof.

[1225] A RNAi agent comprising a first strand and a second strand, wherein the first strand comprises at least 15 contiguous nucleotides from a first strand of: AD-40082.1 (SEQ ID NO: 823), or a modified or unmodified variant thereof.

[1226] A RNAi agent comprising a first strand and a second strand, wherein the first strand comprises at least 15 contiguous nucleotides from a first strand of: AD-40041.1 (SEQ ID NO: 824), or a modified or unmodified variant thereof.

[1227] A RNAi agent comprising a first strand and a second strand, wherein the first strand comprises at least 15 contiguous nucleotides from a first strand of: AD-40047.1 (SEQ ID NO: 825), or a modified or unmodified variant thereof.

[1228] A RNAi agent comprising a first strand and a second strand, wherein the first strand comprises at least 15 contiguous nucleotides from a first strand of: AD-40053.1 (SEQ ID NO: 826), or a modified or unmodified variant thereof.

[1229] A RNAi agent comprising a first strand and a second strand, wherein the first strand comprises at least 15 contiguous nucleotides from a first strand of: AD-40059.1 (SEQ ID NO: 827), or a modified or unmodified variant thereof.

[1230] A RNAi agent comprising a first strand and a second strand, wherein the first strand comprises at least 15 contiguous nucleotides from a first strand of: AD-40065.1 (SEQ ID NO: 828), or a modified or unmodified variant thereof.

[1231] A RNAi agent comprising a first strand and a second strand, wherein the first strand comprises at least 15 contiguous nucleotides from a first strand of: AD-40071.1 (SEQ ID NO: 829), or a modified or unmodified variant thereof.

[1232] A RNAi agent comprising a first strand and a second strand, wherein the first strand comprises at least 15 contiguous nucleotides from a first strand of: AD-40077.1 (SEQ ID NO: 830),

[1233] A RNAi agent comprising a first strand and a second strand, wherein the first strand comprises at least 15 contiguous nucleotides from a first strand of: AD-40083.1 (SEQ ID NO: 831), or a modified or unmodified variant thereof.

[1234] A RNAi agent comprising a first strand and a second strand, wherein the first strand comprises at least 15 contiguous nucleotides from a first strand of: AD-40042.1 (SEQ ID NO: 832), or a modified or unmodified variant thereof.

[1235] A RNAi agent comprising a first strand and a second strand, wherein the first strand comprises at least 15 contiguous nucleotides from a first strand of: AD-40048.1 (SEQ ID NO: 833), or a modified or unmodified variant thereof.

[1236] A RNAi agent comprising a first strand and a second strand, wherein the first strand comprises at least 15 contiguous nucleotides from a first strand of: AD-40054.1 (SEQ ID NO: 834), or a modified or unmodified variant thereof.

[1237] A RNAi agent comprising a first strand and a second strand, wherein the first strand comprises at least 15 contiguous nucleotides from a first strand of: AD-40060.1 (SEQ ID NO: 835), or a modified or unmodified variant thereof.

[1238] A RNAi agent comprising a first strand and a second strand, wherein the first strand comprises at least 15 contiguous nucleotides from a first strand of: AD-40066.1 (SEQ ID NO: 836), or a modified or unmodified variant thereof.

[1239] A RNAi agent comprising a first strand and a second strand, wherein the first strand comprises at least 15 contiguous nucleotides from a first strand of: AD-40072.1 (SEQ ID NO: 837), or a modified or unmodified variant thereof.

[1240] A RNAi agent comprising a first strand and a second strand, wherein the first strand comprises at least 15 contiguous nucleotides from a first strand of: AD-40078.1 (SEQ ID NO: 838), or a modified or unmodified variant thereof.

[1241] A RNAi agent comprising a first strand and a second strand, wherein the first strand comprises at least 15 contiguous nucleotides from a first strand of: AD-40084.1 (SEQ ID NO: 839), or a modified or unmodified variant thereof.

[1242] A RNAi agent comprising a first strand and a second strand, wherein the first strand comprises at least 15 contiguous nucleotides from a first strand of: AD-40043.1 (SEQ ID NO: 840), or a modified or unmodified variant thereof.

[1243] A RNAi agent comprising a first strand and a second strand, wherein the first strand comprises at least 15 contiguous nucleotides from a first strand of: AD-40049.1 (SEQ ID NO: 841), or a modified or unmodified variant thereof.

[1244] A RNAi agent comprising a first strand and a second strand, wherein the first strand comprises at least 15 contiguous nucleotides from a first strand of: AD-40055.1 (SEQ ID NO: 842), or a modified or unmodified variant thereof.

[1245] A RNAi agent comprising a first strand and a second strand, wherein the first strand comprises at least 15 contiguous nucleotides from a first strand of: AD-40061.1 (SEQ ID NO: 843), or a modified or unmodified variant thereof.

[1246] A RNAi agent comprising a first strand and a second strand, wherein the first strand comprises at least 15 contiguous nucleotides from a first strand of: AD-40067.1 (SEQ ID NO: 844), or a modified or unmodified variant thereof.

[1247] A RNAi agent comprising a first strand and a second strand, wherein the first strand comprises at least 15 contiguous nucleotides from a first strand of: AD-40073.1 (SEQ ID NO: 845), or a modified or unmodified variant thereof.

[1248] A RNAi agent comprising a first strand and a second strand, wherein the first strand comprises at least 15 contiguous nucleotides from a first strand of: AD-40079.1 (SEQ ID NO: 846), or a modified or unmodified variant thereof.

[1249] A RNAi agent comprising a first strand and a second strand, wherein the first strand comprises at least 15 contiguous nucleotides from a first strand of: AD-40085.1 (SEQ ID NO: 847), or a modified or unmodified variant thereof.

[1250] A RNAi agent comprising a first strand and a second strand, wherein the first strand comprises at least 15 contiguous nucleotides from a first strand of: AD-40044.1 (SEQ ID NO: 848), or a modified or unmodified variant thereof.

[1251] A RNAi agent comprising a first strand and a second strand, wherein the first strand comprises at least 15 contiguous nucleotides from a first strand of: AD-40050.1 (SEQ ID NO: 849), or a modified or unmodified variant thereof.

[1252] A RNAi agent comprising a first strand and a second strand, wherein the first strand comprises at least 15 contiguous nucleotides from a first strand of: AD-40056.1 (SEQ ID NO: 850), or a modified or unmodified variant thereof.

[1253] A RNAi agent comprising a first strand and a second strand, wherein the first strand comprises at least 15 contiguous nucleotides from a first strand of: AD-40062.1 (SEQ ID NO: 851), or a modified or unmodified variant thereof.

[1254] A RNAi agent comprising a first strand and a second strand, wherein the first strand comprises at least 15 contiguous nucleotides from a first strand of: AD-40068.1 (SEQ ID NO: 852), or a modified or unmodified variant thereof.

[1255] A RNAi agent comprising a first strand and a second strand, wherein the first strand comprises at least 15 contiguous nucleotides from a first strand of: AD-40074.1 (SEQ ID NO: 853), or a modified or unmodified variant thereof.

[1256] A RNAi agent comprising a first strand and a second strand, wherein the first strand comprises at least 15 contiguous nucleotides from a first strand of: AD-40080.1 (SEQ ID NO: 854), or a modified or unmodified variant thereof.

[1257] A RNAi agent comprising a first strand and a second strand, wherein the first strand comprises at least 15 contiguous nucleotides from a first strand of: AD-39720.1 (SEQ ID NOs: 1754), or a modified or unmodified variant thereof.

[1258] A RNAi agent comprising a first strand and a second strand, wherein the first strand comprises at least 15 contiguous nucleotides from a first strand of: AD-39706.1 (SEQ ID NOs: 1755), or a modified or unmodified variant thereof.

[1259] A RNAi agent comprising a first strand and a second strand, wherein the first strand comprises at least 15 contiguous nucleotides from a first strand of: AD-39712.1 (SEQ ID NOs: 1756), or a modified or unmodified variant thereof.

[1260] A RNAi agent comprising a first strand and a second strand, wherein the first strand comprises at least 15 contiguous nucleotides from a first strand of: AD-39760.1 (SEQ ID NOs: 1757), or a modified or unmodified variant thereof.

[1261] A RNAi agent comprising a first strand and a second strand, wherein the first strand comprises at least 15 contiguous nucleotides from a first strand of: AD-39732.1 (SEQ ID NOs: 1758), or a modified or unmodified variant thereof.

[1262] A RNAi agent comprising a first strand and a second strand, wherein the first strand comprises at least 15 contiguous nucleotides from a first strand of: AD-35541.4 (SEQ ID NOs: 1759), or a modified or unmodified variant thereof.

[1263] A RNAi agent comprising a first strand and a second strand, wherein the first strand comprises at least 15 contiguous nucleotides from a first strand of: AD-39735.1 or hs_KRAS_{—} 321_A22S26 (SEQ ID NOs: 1760), or a modified or unmodified variant thereof.

[1264] A RNAi agent comprising a first strand and a second strand, wherein the first strand comprises at least 15 contiguous nucleotides from a first strand of: AD-39741.1, or modified or unmodified variants thereof.

[1265] hs_KRAS_{—}322_A22S26 (SEQ ID NOs: 1761), or a modified or unmodified variant thereof.

[1266] A RNAi agent comprising a first strand and a second strand, wherein the first strand comprises at least 15 contiguous nucleotides from a first strand of: AD-39778.1 (SEQ ID NOs: 1762), or a modified or unmodified variant thereof.

[1267] A RNAi agent comprising a first strand and a second strand, wherein the first strand comprises at least 15 contiguous nucleotides from a first strand of: AD-39790.1 (SEQ ID NOs: 1763), or a modified or unmodified variant thereof.

[1268] A RNAi agent comprising a first strand and a second strand, wherein the first strand comprises at least 15 contiguous nucleotides from a first strand of: AD-39822.1 (SEQ ID NOs: 1764), or a modified or unmodified variant thereof.

[1269] A RNAi agent comprising a first strand and a second strand, wherein the first strand comprises at least 15 contiguous nucleotides from a first strand of: AD-35609.4 (SEQ ID NOs: 1765), or a modified or unmodified variant thereof.

[1270] A RNAi agent comprising a first strand and a second strand, wherein the first strand comprises at least 15 contiguous nucleotides from a first strand of: AD-35581.4 (SEQ ID NOs: 1766), or a modified or unmodified variant thereof.

[1271] A RNAi agent comprising a first strand and a second strand, wherein the first strand comprises at least 15 contiguous nucleotides from a first strand of: AD-39845.1 (SEQ ID NOs: 1767), or a modified or unmodified variant thereof.

[1272] A RNAi agent comprising a first strand and a second strand, wherein the first strand comprises at least 15 contiguous nucleotides from a first strand of: AD-39858.1 (SEQ ID NOs: 1768), or a modified or unmodified variant thereof.

[1273] A RNAi agent comprising a first strand and a second strand, wherein the first strand comprises at least 15 contiguous nucleotides from a first strand of: AD-39870.1 (SEQ ID NOs: 1769), or a modified or unmodified variant thereof.

[1274] A RNAi agent comprising a first strand and a second strand, wherein the first strand comprises at least 15 contiguous nucleotides from a first strand of: AD-35576.4 (SEQ ID NOs: 1770), or a modified or unmodified variant thereof.

[1275] A RNAi agent comprising a first strand and a second strand, wherein the first strand comprises at least 15 contiguous nucleotides from a first strand of: AD-35588.4 (SEQ ID NOs: 1771), or a modified or unmodified variant thereof.

[1276] A RNAi agent comprising a first strand and a second strand, wherein the first strand comprises at least 15 contiguous nucleotides from a first strand of: AD-35600.1 (SEQ ID NOs: 1772), or a modified or unmodified variant thereof.

[1277] A RNAi agent comprising a first strand and a second strand, wherein the first strand comprises at least 15 contiguous nucleotides from a first strand of: AD-35606.1 (SEQ ID NOs: 1773), or a modified or unmodified variant thereof.

[1278] A RNAi agent comprising a first strand and a second strand, wherein the first strand comprises at least 15 contiguous nucleotides from a first strand of: AD-38151.1 (SEQ ID NOs: 1774), or a modified or unmodified variant thereof.

[1279] A RNAi agent comprising a first strand and a second strand, wherein the first strand comprises at least 15 contiguous nucleotides from a first strand of: AD-38163.1 (SEQ ID NOs: 1775), or a modified or unmodified variant thereof.

[1280] A RNAi agent comprising a first strand and a second strand, wherein the first strand comprises at least 15 contiguous nucleotides from a first strand of: AD-39999.1 (SEQ ID NOs: 1776), or a modified or unmodified variant thereof.

[1281] A RNAi agent comprising a first strand and a second strand, wherein the first strand comprises at least 15 contiguous nucleotides from a first strand of: AD-38159.1 or hs_KRAS_{—} 528_A22S26 (SEQ ID NOs: 1777), or a modified or unmodified variant thereof.

[1282] A RNAi agent comprising a first strand and a second strand, wherein the first strand comprises at least 15 contiguous nucleotides from a first strand of: AD-38130.1 or hs_KRAS_{—} 531_A22S26 (SEQ ID NOs: 1778), or a modified or unmodified variant thereof.

[1283] A RNAi agent comprising a first strand and a second strand, wherein the first strand comprises at least 15 contiguous nucleotides from a first strand of: AD-38136.1 (SEQ ID NOs: 1779), or a modified or unmodified variant thereof.

[1284] A RNAi agent comprising a first strand and a second strand, wherein the first strand comprises at least 15 contiguous nucleotides from a first strand of: AD-40036.1 (SEQ ID NOs: 1780), or a modified or unmodified variant thereof.

[1285] A RNAi agent comprising a first strand and a second strand, wherein the first strand comprises at least 15 contiguous nucleotides from a first strand of: AD-40008.1 (SEQ ID NOs: 1781), or a modified or unmodified variant thereof.

[1286] A RNAi agent comprising a first strand and a second strand, wherein the first strand comprises at least 15 contiguous nucleotides from a first strand of: AD-40021.1 (SEQ ID NOs: 1782), or a modified or unmodified variant thereof.

[1287] A RNAi agent comprising a first strand and a second strand, wherein the first strand comprises at least 15 contiguous nucleotides from a first strand of: AD-40077.1 (SEQ ID NOs: 1783), or a modified or unmodified variant thereof.

[1288] A RNAi agent comprising a first strand and a second strand, wherein the first strand comprises at least 15 contiguous nucleotides from a first strand of: AD-40072.1 (SEQ ID NOs: 1784), or a modified or unmodified variant thereof.

[1289] A RNAi agent comprising a first strand and a second strand, wherein the first strand comprises at least 15 contiguous nucleotides from a first strand of: AD-40061.1 (SEQ ID NOs: 1785), or a modified or unmodified variant thereof.

[1290] A RNAi agent comprising a first strand and a second strand, wherein the first strand comprises at least 15 contiguous nucleotides from a first strand of: AD-40068.1 (SEQ ID NOs: 1786), or a modified or unmodified variant thereof.

[1291] A RNAi agent comprising a first strand and a second strand, wherein the first strand comprises at least 15 contiguous nucleotides from a first strand of: AD-38131.1 (SEQ ID NOs: 1787), or a modified or unmodified variant thereof.

[1292] A RNAi agent comprising a first strand and a second strand, wherein the first strand comprises at least 15 contiguous nucleotides from a first strand of: AD-38167.1 (SEQ ID NOs: 1788), or a modified or unmodified variant thereof.

[1293] A RNAi agent comprising a first strand and a second strand, wherein the first strand comprises at least 15 contiguous nucleotides from a first strand of: hs_KRAS 1273_A22S26 (SEQ ID NOs: 1789), or a modified or unmodified variant thereof.

[1294] A RNAi agent comprising a first strand and a second strand, wherein the first strand comprises at least 15 contiguous nucleotides from a first strand of: hs_KRAS 2892_A37S26 (SEQ ID NOs: 1790), or a modified or unmodified variant thereof.

[1295] A RNAi agent comprising a first strand and a second strand, wherein the first strand comprises at least 15 contiguous nucleotides from a first strand of: hs_KRAS 4731_A22S26 (SEQ ID NOs: 1791), or a modified or unmodified variant thereof.

[1296] Specific embodiments comprising a first strand of a RNAi agent disclosed herein

[1297] In one embodiment, the present disclosure pertains to a composition comprising any one or more of: a RNAi agent comprising a first and a second strand, wherein the sequence of the first strand is the sequence of a first strand of any RNAi agent from any of Tables 1 to 6, or modified and unmodified variants thereof.

[1298] Thus, in various embodiments, the present disclosure pertains to a composition comprising any one or more of the following:

[1299] A RNAi agent comprising a first and a second strand, wherein the sequence of the first strand is the sequence of a first strand of: AD-35523.3 (SEQ ID NO: 428), or a modified or unmodified variant thereof.

[1300] A RNAi agent comprising a first and a second strand, wherein the sequence of the first strand is the sequence of a first strand of: AD-35529.1 (SEQ ID NO: 429), or a modified or

[1301] A RNAi agent comprising a first and a second strand, wherein the sequence of the first strand is the sequence of a first strand of: AD-35535.4 (SEQ ID NO: 430), or a modified or unmodified variant thereof.

[1302] A RNAi agent comprising a first and a second strand, wherein the sequence of the first strand is the sequence of a first strand of: AD-35541.4 (SEQ ID NO: 431), or a modified or unmodified variant thereof.

[1303] A RNAi agent comprising a first and a second strand, wherein the sequence of the first strand is the sequence of a first strand of: AD-35547.4 (SEQ ID NO: 432), or a modified or unmodified variant thereof.

[1304] A RNAi agent comprising a first and a second strand, wherein the sequence of the first strand is the sequence of a first strand of: AD-35553.4 (SEQ ID NO: 433), or a modified or unmodified variant thereof.

[1305] A RNAi agent comprising a first and a second strand, wherein the sequence of the first strand is the sequence of a first strand of: AD-35559.4 (SEQ ID NO: 434), or a modified or unmodified variant thereof.

[1306] A RNAi agent comprising a first and a second strand, wherein the sequence of the first strand is the sequence of a first strand of: AD-35565.4 (SEQ ID NO: 435), or a modified or unmodified variant thereof.

[1307] A RNAi agent comprising a first and a second strand, wherein the sequence of the first strand is the sequence of a first strand of: AD-35524.4 (SEQ ID NO: 436), or a modified or unmodified variant thereof.

[1308] A RNAi agent comprising a first and a second strand, wherein the sequence of the first strand is the sequence of a first strand of: AD-35530.4 (SEQ ID NO: 437), or a modified or unmodified variant thereof.

[1309] A RNAi agent comprising a first and a second strand, wherein the sequence of the first strand is the sequence of a first strand of: AD-35536.4 (SEQ ID NO: 438), or a modified or unmodified variant thereof.

[1310] A RNAi agent comprising a first and a second strand, wherein the sequence of the first strand is the sequence of a first strand of: AD-35542.4 (SEQ ID NO: 439), or a modified or unmodified variant thereof.

[1311] A RNAi agent comprising a first and a second strand, wherein the sequence of the first strand is the sequence of a first strand of: AD-35548.4 (SEQ ID NO: 440), or a modified or unmodified variant thereof.

[1312] A RNAi agent comprising a first and a second strand, wherein the sequence of the first strand is the sequence of a first strand of: AD-35554.4 (SEQ ID NO: 441), or a modified or unmodified variant thereof.

[1313] A RNAi agent comprising a first and a second strand, wherein the sequence of the first strand is the sequence of a first strand of: AD-35560.2 (SEQ ID NO: 442), or a modified or unmodified variant thereof.

[1314] A RNAi agent comprising a first and a second strand, wherein the sequence of the first strand is the sequence of a first strand of: AD-35566.4 (SEQ ID NO: 443), or a modified or unmodified variant thereof.

[1315] A RNAi agent comprising a first and a second strand, wherein the sequence of the first strand is the sequence of a first strand of: AD-35525.2 (SEQ ID NO: 444), or a modified or unmodified variant thereof.

[1316] A RNAi agent comprising a first and a second strand, wherein the sequence of the first strand is the sequence of a first strand of: AD-35531.4 (SEQ ID NO: 445), or a modified or unmodified variant thereof.

[1317] A RNAi agent comprising a first and a second strand, wherein the sequence of the first strand is the sequence of a first strand of: AD-35537.4 (SEQ ID NO: 446), or a modified or unmodified variant thereof.

[1318] A RNAi agent comprising a first and a second strand, wherein the sequence of the first strand is the sequence of a first strand of: AD-35543.2 (SEQ ID NO: 447), or a modified or unmodified variant thereof.

[1319] A RNAi agent comprising a first and a second strand, wherein the sequence of the first strand is the sequence of a first strand of: AD-35549.4 (SEQ ID NO: 448), or a modified or unmodified variant thereof.

[1320] A RNAi agent comprising a first and a second strand, wherein the sequence of the first strand is the sequence of a first strand of: AD-35555.4 (SEQ ID NO: 449), or a modified or unmodified variant thereof.

[1321] A RNAi agent comprising a first and a second strand, wherein the sequence of the first strand is the sequence of a first strand of: AD-35561.4 (SEQ ID NO: 450), or a modified or unmodified variant thereof.

[1322] A RNAi agent comprising a first and a second strand, wherein the sequence of the first strand is the sequence of a first strand of: AD-35567.4 (SEQ ID NO: 451), or a modified or unmodified variant thereof.

[1323] A RNAi agent comprising a first and a second strand, wherein the sequence of the first strand is the sequence of a first strand of: AD-35526.4 (SEQ ID NO: 452), or a modified or unmodified variant thereof.

[1324] A RNAi agent comprising a first and a second strand, wherein the sequence of the first strand is the sequence of a first strand of: AD-35532.4 (SEQ ID NO: 453), or a modified or unmodified variant thereof.

[1325] A RNAi agent comprising a first and a second strand, wherein the sequence of the first strand is the sequence of a first strand of: AD-35538.4 (SEQ ID NO: 454), or a modified or unmodified variant thereof.

[1326] A RNAi agent comprising a first and a second strand, wherein the sequence of the first strand is the sequence of a first strand of: AD-35544.4 (SEQ ID NO: 455), or a modified or unmodified variant thereof.

[1327] A RNAi agent comprising a first and a second strand, wherein the sequence of the first strand is the sequence of a first strand of: AD-35550.4 (SEQ ID NO: 456), or a modified or unmodified variant thereof.

[1328] A RNAi agent comprising a first and a second strand, wherein the sequence of the first strand is the sequence of a first strand of: AD-35556.4 (SEQ ID NO: 457), or a modified or unmodified variant thereof.

[1329] A RNAi agent comprising a first and a second strand, wherein the sequence of the first strand is the sequence of a first strand of: AD-35562.4 (SEQ ID NO: 458), or a modified or unmodified variant thereof.

[1330] A RNAi agent comprising a first and a second strand, wherein the sequence of the first strand is the sequence of a first strand of: AD-35568.4 (SEQ ID NO: 459), or a modified or unmodified variant thereof.

[1331] A RNAi agent comprising a first and a second strand, wherein the sequence of the first strand is the sequence of a first strand of: AD-35527.4 (SEQ ID NO: 460), or a modified or unmodified variant thereof.

[1332] A RNAi agent comprising a first and a second strand, wherein the sequence of the first strand is the sequence of a first strand of: AD-35533.4 (SEQ ID NO: 461), or a modified or unmodified variant thereof.

[1333] A RNAi agent comprising a first and a second strand, wherein the sequence of the first strand is the sequence of a first strand of: AD-35539.4 (SEQ ID NO: 462), or a modified or unmodified variant thereof.

[1334] A RNAi agent comprising a first and a second strand, wherein the sequence of the first strand is the sequence of a first strand of: AD-35545.4 (SEQ ID NO: 463), or a modified or unmodified variant thereof.

[1335] A RNAi agent comprising a first and a second strand, wherein the sequence of the first strand is the sequence of a first strand of: AD-35551.4 (SEQ ID NO: 464), or a modified or unmodified variant thereof.

[1336] A RNAi agent comprising a first and a second strand, wherein the sequence of the first strand is the sequence of a first strand of: AD-35563.4 (SEQ ID NO: 465), or a modified or unmodified variant thereof.

[1337] A RNAi agent comprising a first and a second strand, wherein the sequence of the first strand is the sequence of a first strand of: AD-35528.4 (SEQ ID NO: 466), or a modified or unmodified variant thereof.

[1338] A RNAi agent comprising a first and a second strand, wherein the sequence of the first strand is the sequence of a first strand of: AD-35540.4 (SEQ ID NO: 467), or a modified or unmodified variant thereof.

[1339] A RNAi agent comprising a first and a second strand, wherein the sequence of the first strand is the sequence of a first strand of: AD-35546.4 (SEQ ID NO: 468), or a modified or unmodified variant thereof.

[1340] A RNAi agent comprising a first and a second strand, wherein the sequence of the first strand is the sequence of a first strand of: AD-35552.4 (SEQ ID NO: 469), or a modified or unmodified variant thereof.

[1341] A RNAi agent comprising a first and a second strand, wherein the sequence of the first strand is the sequence of a first strand of: AD-35558.4 (SEQ ID NO: 470), or a modified or

[1342] A RNAi agent comprising a first and a second strand, wherein the sequence of the first strand is the sequence of a first strand of: AD-35564.4 (SEQ ID NO: 471), or a modified or unmodified variant thereof.

[1343] A RNAi agent comprising a first and a second strand, wherein the sequence of the first strand is the sequence of a first strand of: AD-35570.4 (SEQ ID NO: 472), or a modified or unmodified variant thereof.

[1344] A RNAi agent comprising a first and a second strand, wherein the sequence of the first strand is the sequence of a first strand of: AD-35571.4 (SEQ ID NO: 473), or a modified or unmodified variant thereof.

[1345] A RNAi agent comprising a first and a second strand, wherein the sequence of the first strand is the sequence of a first strand of: AD-35577.4 (SEQ ID NO: 474), or a modified or unmodified variant thereof.

[1346] A RNAi agent comprising a first and a second strand, wherein the sequence of the first strand is the sequence of a first strand of: AD-35583.4 (SEQ ID NO: 475), or a modified or unmodified variant thereof.

[1347] A RNAi agent comprising a first and a second strand, wherein the sequence of the first strand is the sequence of a first strand of: AD-35589.4 (SEQ ID NO: 476), or a modified or unmodified variant thereof.

[1348] A RNAi agent comprising a first and a second strand, wherein the sequence of the first strand is the sequence of a first strand of: AD-35595.4 (SEQ ID NO: 477), or a modified or unmodified variant thereof.

[1349] A RNAi agent comprising a first and a second strand, wherein the sequence of the first strand is the sequence of a first strand of: AD-35601.4 (SEQ ID NO: 478), or a modified or unmodified variant thereof.

[1350] A RNAi agent comprising a first and a second strand, wherein the sequence of the first strand is the sequence of a first strand of: AD-35607.4 (SEQ ID NO: 479), or a modified or unmodified variant thereof.

[1351] A RNAi agent comprising a first and a second strand, wherein the sequence of the first strand is the sequence of a first strand of: AD-35613.4 (SEQ ID NO: 480), or a modified or unmodified variant thereof.

[1352] A RNAi agent comprising a first and a second strand, wherein the sequence of the first strand is the sequence of a first strand of: AD-35572.4 (SEQ ID NO: 481), or a modified or unmodified variant thereof.

[1353] A RNAi agent comprising a first and a second strand, wherein the sequence of the first strand is the sequence of a first strand of: AD-35578.4 (SEQ ID NO: 482), or a modified or unmodified variant thereof.

[1354] A RNAi agent comprising a first and a second strand, wherein the sequence of the first strand is the sequence of a first strand of: AD-35584.4 (SEQ ID NO: 483), or a modified or unmodified variant thereof.

[1355] A RNAi agent comprising a first and a second strand, wherein the sequence of the first strand is the sequence of a first strand of: AD-35590.4 (SEQ ID NO: 484), or a modified or unmodified variant thereof.

[1356] A RNAi agent comprising a first and a second strand, wherein the sequence of the first strand is the sequence of a first strand of: AD-35596.4 (SEQ ID NO: 485), or a modified or unmodified variant thereof.

[1357] A RNAi agent comprising a first and a second strand, wherein the sequence of the first strand is the sequence of a first strand of: AD-35602.4 (SEQ ID NO: 486), or a modified or unmodified variant thereof.

[1358] A RNAi agent comprising a first and a second strand, wherein the sequence of the first strand is the sequence of a first strand of: AD-35608.4 (SEQ ID NO: 487), or a modified or unmodified variant thereof.

[1359] A RNAi agent comprising a first and a second strand, wherein the sequence of the first strand is the sequence of a first strand of: AD-35614.4 (SEQ ID NO: 488), or a modified or unmodified variant thereof.

[1360] A RNAi agent comprising a first and a second strand, wherein the sequence of the first strand is the sequence of a first strand of: AD-35573.4 (SEQ ID NO: 489), or a modified or unmodified variant thereof.

[1361] A RNAi agent comprising a first and a second strand, wherein the sequence of the first strand is the sequence of a first strand of: AD-35579.4 (SEQ ID NO: 490), or a modified or unmodified variant thereof.

[1362] A RNAi agent comprising a first and a second strand, wherein the sequence of the first strand is the sequence of a first strand of: AD-35585.4 (SEQ ID NO: 491), or a modified or unmodified variant thereof.

[1363] A RNAi agent comprising a first and a second strand, wherein the sequence of the first strand is the sequence of a first strand of: AD-35591.4 (SEQ ID NO: 492), or a modified or unmodified variant thereof.

[1364] A RNAi agent comprising a first and a second strand, wherein the sequence of the first strand is the sequence of a first strand of: AD-35597.4 (SEQ ID NO: 493), or a modified or unmodified variant thereof.

[1365] A RNAi agent comprising a first and a second strand, wherein the sequence of the first strand is the sequence of a first strand of: AD-35603.4 (SEQ ID NO: 494), or a modified or unmodified variant thereof.

[1366] A RNAi agent comprising a first and a second strand, wherein the sequence of the first strand is the sequence of a first strand of: AD-35609.4 (SEQ ID NO: 495), or a modified or unmodified variant thereof.

[1367] A RNAi agent comprising a first and a second strand, wherein the sequence of the first strand is the sequence of a first strand of: AD-35615.4 (SEQ ID NO: 496), or a modified or unmodified variant thereof.

[1368] A RNAi agent comprising a first and a second strand, wherein the sequence of the first strand is the sequence of a first strand of: AD-35574.4 (SEQ ID NO: 497), or a modified or unmodified variant thereof.

[1369] A RNAi agent comprising a first and a second strand, wherein the sequence of the first strand is the sequence of a first strand of: AD-35580.1 (SEQ ID NO: 498), or a modified or unmodified variant thereof.

[1370] A RNAi agent comprising a first and a second strand, wherein the sequence of the first strand is the sequence of a first strand of: AD-35586.4 (SEQ ID NO: 499), or a modified or unmodified variant thereof.

[1371] A RNAi agent comprising a first and a second strand, wherein the sequence of the first strand is the sequence of a first strand of: AD-35592.4 (SEQ ID NO: 500), or a modified or unmodified variant thereof.

[1372] A RNAi agent comprising a first and a second strand, wherein the sequence of the first strand is the sequence of a first strand of: AD-35598.4 (SEQ ID NO: 501), or a modified or unmodified variant thereof.

[1373] A RNAi agent comprising a first and a second strand, wherein the sequence of the first strand is the sequence of a first strand of: AD-35604.4 (SEQ ID NO: 502), or a modified or unmodified variant thereof.

[1374] A RNAi agent comprising a first and a second strand, wherein the sequence of the first strand is the sequence of a first strand of: AD-35610.4 (SEQ ID NO: 503), or a modified or unmodified variant thereof.

[1375] A RNAi agent comprising a first and a second strand, wherein the sequence of the first strand is the sequence of a first strand of: AD-35616.4 (SEQ ID NO: 504), or a modified or unmodified variant thereof.

[1376] A RNAi agent comprising a first and a second strand, wherein the sequence of the first strand is the sequence of a first strand of: AD-35575.4 (SEQ ID NO: 505), or a modified or unmodified variant thereof.

[1377] A RNAi agent comprising a first and a second strand, wherein the sequence of the first strand is the sequence of a first strand of: AD-35581.4 (SEQ ID NO: 506), or a modified or unmodified variant thereof.

[1378] A RNAi agent comprising a first and a second strand, wherein the sequence of the first strand is the sequence of a first strand of: AD-35587.4 (SEQ ID NO: 507), or a modified or unmodified variant thereof.

[1379] A RNAi agent comprising a first and a second strand, wherein the sequence of the first strand is the sequence of a first strand of: AD-35593.4 (SEQ ID NO: 508), or a modified or unmodified variant thereof.

[1380] A RNAi agent comprising a first and a second strand, wherein the sequence of the first strand is the sequence of a first strand of: AD-35599.4 (SEQ ID NO: 509), or a modified or unmodified variant thereof.

[1381] A RNAi agent comprising a first and a second strand, wherein the sequence of the first strand is the sequence of a first strand of: AD-35605.4 (SEQ ID NO: 510), or a modified or unmodified variant thereof.

[1382] A RNAi agent comprising a first and a second strand, wherein the sequence of the first strand is the sequence of a first strand of: AD-35611.4 (SEQ ID NO: 511), or a modified or

[1383] A RNAi agent comprising a first and a second strand, wherein the sequence of the first strand is the sequence of a first strand of: AD-35617.4 (SEQ ID NO: 512), or a modified or unmodified variant thereof.

[1384] A RNAi agent comprising a first and a second strand, wherein the sequence of the first strand is the sequence of a first strand of: AD-35576.4 (SEQ ID NO: 513), or a modified or unmodified variant thereof.

[1385] A RNAi agent comprising a first and a second strand, wherein the sequence of the first strand is the sequence of a first strand of: AD-35588.4 (SEQ ID NO: 514), or a modified or unmodified variant thereof.

[1386] A RNAi agent comprising a first and a second strand, wherein the sequence of the first strand is the sequence of a first strand of: AD-35667.1 (SEQ ID NO: 515), or a modified or unmodified variant thereof.

[1387] A RNAi agent comprising a first and a second strand, wherein the sequence of the first strand is the sequence of a first strand of: AD-35673.1 (SEQ ID NO: 516), or a modified or unmodified variant thereof.

[1388] A RNAi agent comprising a first and a second strand, wherein the sequence of the first strand is the sequence of a first strand of: AD-35679.1 (SEQ ID NO: 517), or a modified or unmodified variant thereof.

[1389] A RNAi agent comprising a first and a second strand, wherein the sequence of the first strand is the sequence of a first strand of: AD-35685.1 (SEQ ID NO: 518), or a modified or unmodified variant thereof.

[1390] A RNAi agent comprising a first and a second strand, wherein the sequence of the first strand is the sequence of a first strand of: AD-35691.1 (SEQ ID NO: 519), or a modified or unmodified variant thereof.

[1391] A RNAi agent comprising a first and a second strand, wherein the sequence of the first strand is the sequence of a first strand of: AD-35557.1 (SEQ ID NO: 520), or a modified or unmodified variant thereof.

[1392] A RNAi agent comprising a first and a second strand, wherein the sequence of the first strand is the sequence of a first strand of: AD-35618.1 (SEQ ID NO: 521), or a modified or unmodified variant thereof.

[1393] A RNAi agent comprising a first and a second strand, wherein the sequence of the first strand is the sequence of a first strand of: AD-35569.1 (SEQ ID NO: 522), or a modified or unmodified variant thereof.

[1394] A RNAi agent comprising a first and a second strand, wherein the sequence of the first strand is the sequence of a first strand of: AD-35534.1 (SEQ ID NO: 523), or a modified or unmodified variant thereof.

[1395] A RNAi agent comprising a first and a second strand, wherein the sequence of the first strand is the sequence of a first strand of: AD-35582.1 (SEQ ID NO: 524), or a modified or unmodified variant thereof.

[1396] A RNAi agent comprising a first and a second strand, wherein the sequence of the first strand is the sequence of a first strand of: AD-35594.1 (SEQ ID NO: 525), or a modified or unmodified variant thereof.

[1397] A RNAi agent comprising a first and a second strand, wherein the sequence of the first strand is the sequence of a first strand of: AD-35600.1 (SEQ ID NO: 526), or a modified or unmodified variant thereof.

[1398] A RNAi agent comprising a first and a second strand, wherein the sequence of the first strand is the sequence of a first strand of: AD-35606.1 (SEQ ID NO: 527), or a modified or unmodified variant thereof.

[1399] A RNAi agent comprising a first and a second strand, wherein the sequence of the first strand is the sequence of a first strand of: AD-35612.1 (SEQ ID NO: 528), or a modified or unmodified variant thereof.

[1400] A RNAi agent comprising a first and a second strand, wherein the sequence of the first strand is the sequence of a first strand of: AD-38127.1 (SEQ ID NO: 529), or a modified or unmodified variant thereof.

[1401] A RNAi agent comprising a first and a second strand, wherein the sequence of the first strand is the sequence of a first strand of: AD-38133.1 (SEQ ID NO: 530), or a modified or unmodified variant thereof.

[1402] A RNAi agent comprising a first and a second strand, wherein the sequence of the first strand is the sequence of a first strand of: AD-38139.1 (SEQ ID NO: 531), or a modified or unmodified variant thereof.

[1403] A RNAi agent comprising a first and a second strand, wherein the sequence of the first strand is the sequence of a first strand of: AD-38145.1 (SEQ ID NO: 532), or a modified or unmodified variant thereof.

[1404] A RNAi agent comprising a first and a second strand, wherein the sequence of the first strand is the sequence of a first strand of: AD-38151.1 (SEQ ID NO: 533), or a modified or unmodified variant thereof.

[1405] A RNAi agent comprising a first and a second strand, wherein the sequence of the first strand is the sequence of a first strand of: AD-38157.1 (SEQ ID NO: 534), or a modified or unmodified variant thereof.

[1406] A RNAi agent comprising a first and a second strand, wherein the sequence of the first strand is the sequence of a first strand of: AD-38163.1 (SEQ ID NO: 535), or a modified or unmodified variant thereof.

[1407] A RNAi agent comprising a first and a second strand, wherein the sequence of the first strand is the sequence of a first strand of: AD-38169.1 (SEQ ID NO: 536), or a modified or unmodified variant thereof.

[1408] A RNAi agent comprising a first and a second strand, wherein the sequence of the first strand is the sequence of a first strand of: AD-38128.1 (SEQ ID NO: 537), or a modified or unmodified variant thereof.

[1409] A RNAi agent comprising a first and a second strand, wherein the sequence of the first strand is the sequence of a first strand of: AD-38134.1 (SEQ ID NO: 538), or a modified or unmodified variant thereof.

[1410] A RNAi agent comprising a first and a second strand, wherein the sequence of the first strand is the sequence of a first strand of: AD-38140.1 (SEQ ID NO: 539), or a modified or unmodified variant thereof.

[1411] A RNAi agent comprising a first and a second strand, wherein the sequence of the first strand is the sequence of a first strand of: AD-38146.1 (SEQ ID NO: 540), or a modified or unmodified variant thereof.

[1412] A RNAi agent comprising a first and a second strand, wherein the sequence of the first strand is the sequence of a first strand of: AD-38152.1 (SEQ ID NO: 541), or a modified or unmodified variant thereof.

[1413] A RNAi agent comprising a first and a second strand, wherein the sequence of the first strand is the sequence of a first strand of: AD-38158.1 (SEQ ID NO: 542), or a modified or unmodified variant thereof.

[1414] A RNAi agent comprising a first and a second strand, wherein the sequence of the first strand is the sequence of a first strand of: AD-38164.1 (SEQ ID NO: 543), or a modified or unmodified variant thereof.

[1415] A RNAi agent comprising a first and a second strand, wherein the sequence of the first strand is the sequence of a first strand of: AD-38170.1 (SEQ ID NO: 544), or a modified or unmodified variant thereof.

[1416] A RNAi agent comprising a first and a second strand, wherein the sequence of the first strand is the sequence of a first strand of: AD-38129.1 (SEQ ID NO: 545), or a modified or unmodified variant thereof.

[1417] A RNAi agent comprising a first and a second strand, wherein the sequence of the first strand is the sequence of a first strand of: AD-38135.1 (SEQ ID NO: 546), or a modified or unmodified variant thereof.

[1418] A RNAi agent comprising a first and a second strand, wherein the sequence of the first strand is the sequence of a first strand of: AD-38141.1 (SEQ ID NO: 547), or a modified or unmodified variant thereof.

[1419] A RNAi agent comprising a first and a second strand, wherein the sequence of the first strand is the sequence of a first strand of: AD-38147.1 (SEQ ID NO: 548), or a modified or unmodified variant thereof.

[1420] A RNAi agent comprising a first and a second strand, wherein the sequence of the first strand is the sequence of a first strand of: AD-38153.1 (SEQ ID NO: 549), or a modified or unmodified variant thereof.

[1421] A RNAi agent comprising a first and a second strand, wherein the sequence of the first strand is the sequence of a first strand of: AD-38159.1 (SEQ ID NO: 550), or a modified or unmodified variant thereof.

[1422] A RNAi agent comprising a first and a second strand, wherein the sequence of the first strand is the sequence of a first strand of: AD-38165.1 (SEQ ID NO: 551), or a modified or unmodified variant thereof.

[1423] A RNAi agent comprising a first and a second strand, wherein the sequence of the first strand is the sequence of a first strand of: AD-38171.1 (SEQ ID NO: 552), or a modified or

[1424] A RNAi agent comprising a first and a second strand, wherein the sequence of the first strand is the sequence of a first strand of: AD-38130.1 (SEQ ID NO: 553), or a modified or unmodified variant thereof.

[1425] A RNAi agent comprising a first and a second strand, wherein the sequence of the first strand is the sequence of a first strand of: AD-38136.1 (SEQ ID NO: 554), or a modified or unmodified variant thereof.

[1426] A RNAi agent comprising a first and a second strand, wherein the sequence of the first strand is the sequence of a first strand of: AD-38142.1 (SEQ ID NO: 555), or a modified or unmodified variant thereof.

[1427] A RNAi agent comprising a first and a second strand, wherein the sequence of the first strand is the sequence of a first strand of: AD-38148.1 (SEQ ID NO: 556), or a modified or unmodified variant thereof.

[1428] A RNAi agent comprising a first and a second strand, wherein the sequence of the first strand is the sequence of a first strand of: AD-38154.1 (SEQ ID NO: 557), or a modified or unmodified variant thereof.

[1429] A RNAi agent comprising a first and a second strand, wherein the sequence of the first strand is the sequence of a first strand of: AD-38160.1 (SEQ ID NO: 558), or a modified or unmodified variant thereof.

[1430] A RNAi agent comprising a first and a second strand, wherein the sequence of the first strand is the sequence of a first strand of: AD-38166.1 (SEQ ID NO: 559), or a modified or unmodified variant thereof.

[1431] A RNAi agent comprising a first and a second strand, wherein the sequence of the first strand is the sequence of a first strand of: AD-38172.1 (SEQ ID NO: 560), or a modified or unmodified variant thereof.

[1432] A RNAi agent comprising a first and a second strand, wherein the sequence of the first strand is the sequence of a first strand of: AD-38131.1 (SEQ ID NO: 561), or a modified or unmodified variant thereof.

[1433] A RNAi agent comprising a first and a second strand, wherein the sequence of the first strand is the sequence of a first strand of: AD-38137.1 (SEQ ID NO: 562), or a modified or unmodified variant thereof.

[1434] A RNAi agent comprising a first and a second strand, wherein the sequence of the first strand is the sequence of a first strand of: AD-38143.1 (SEQ ID NO: 563), or a modified or unmodified variant thereof.

[1435] A RNAi agent comprising a first and a second strand, wherein the sequence of the first strand is the sequence of a first strand of: AD-38149.1 (SEQ ID NO: 564), or a modified or unmodified variant thereof.

[1436] A RNAi agent comprising a first and a second strand, wherein the sequence of the first strand is the sequence of a first strand of: AD-38155.1 (SEQ ID NO: 565), or a modified or unmodified variant thereof.

[1437] A RNAi agent comprising a first and a second strand, wherein the sequence of the first strand is the sequence of a first strand of: AD-38161.1 (SEQ ID NO: 566), or a modified or unmodified variant thereof.

[1438] A RNAi agent comprising a first and a second strand, wherein the sequence of the first strand is the sequence of a first strand of: AD-38167.1 (SEQ ID NO: 567), or a modified or unmodified variant thereof.

[1439] A RNAi agent comprising a first and a second strand, wherein the sequence of the first strand is the sequence of a first strand of: AD-38173.1 (SEQ ID NO: 568), or a modified or unmodified variant thereof.

[1440] A RNAi agent comprising a first and a second strand, wherein the sequence of the first strand is the sequence of a first strand of: AD-38132.1 (SEQ ID NO: 569), or a modified or unmodified variant thereof.

[1441] A RNAi agent comprising a first and a second strand, wherein the sequence of the first strand is the sequence of a first strand of: AD-38138.1 (SEQ ID NO: 570), or a modified or unmodified variant thereof.

[1442] A RNAi agent comprising a first and a second strand, wherein the sequence of the first strand is the sequence of a first strand of: AD-38144.1 (SEQ ID NO: 571), or a modified or unmodified variant thereof.

[1443] A RNAi agent comprising a first and a second strand, wherein the sequence of the first strand is the sequence of a first strand of: AD-38150.1 (SEQ ID NO: 572), or a modified or unmodified variant thereof.

[1444] A RNAi agent comprising a first and a second strand, wherein the sequence of the first strand is the sequence of a first strand of: AD-38156.1 (SEQ ID NO: 573), or a modified or unmodified variant thereof.

[1445] A RNAi agent comprising a first and a second strand, wherein the sequence of the first strand is the sequence of a first strand of: AD-38162.1 (SEQ ID NO: 574), or a modified or unmodified variant thereof.

[1446] A RNAi agent comprising a first and a second strand, wherein the sequence of the first strand is the sequence of a first strand of: AD-38168.1 (SEQ ID NO: 575), or a modified or unmodified variant thereof.

[1447] A RNAi agent comprising a first and a second strand, wherein the sequence of the first strand is the sequence of a first strand of: AD-38174.1 (SEQ ID NO: 576), or a modified or unmodified variant thereof.

[1448] A RNAi agent comprising a first and a second strand, wherein the sequence of the first strand is the sequence of a first strand of: AD-39683.1 (SEQ ID NO: 577), or a modified or unmodified variant thereof.

[1449] A RNAi agent comprising a first and a second strand, wherein the sequence of the first strand is the sequence of a first strand of: AD-39689.1 (SEQ ID NO: 578), or a modified or unmodified variant thereof.

[1450] A RNAi agent comprising a first and a second strand, wherein the sequence of the first strand is the sequence of a first strand of: AD-39695.1 (SEQ ID NO: 579), or a modified or unmodified variant thereof.

[1451] A RNAi agent comprising a first and a second strand, wherein the sequence of the first strand is the sequence of a first strand of: AD-39701.1 (SEQ ID NO: 580), or a modified or unmodified variant thereof.

[1452] A RNAi agent comprising a first and a second strand, wherein the sequence of the first strand is the sequence of a first strand of: AD-39707.1 (SEQ ID NO: 581), or a modified or unmodified variant thereof.

[1453] A RNAi agent comprising a first and a second strand, wherein the sequence of the first strand is the sequence of a first strand of: AD-39713.1 (SEQ ID NO: 582), or a modified or unmodified variant thereof.

[1454] A RNAi agent comprising a first and a second strand, wherein the sequence of the first strand is the sequence of a first strand of: AD-39719.1 (SEQ ID NO: 583), or a modified or unmodified variant thereof.

[1455] A RNAi agent comprising a first and a second strand, wherein the sequence of the first strand is the sequence of a first strand of: AD-39725.1 (SEQ ID NO: 584), or a modified or unmodified variant thereof.

[1456] A RNAi agent comprising a first and a second strand, wherein the sequence of the first strand is the sequence of a first strand of: AD-39684.1 (SEQ ID NO: 585), or a modified or unmodified variant thereof.

[1457] A RNAi agent comprising a first and a second strand, wherein the sequence of the first strand is the sequence of a first strand of: AD-39690.1 (SEQ ID NO: 586), or a modified or unmodified variant thereof.

[1458] A RNAi agent comprising a first and a second strand, wherein the sequence of the first strand is the sequence of a first strand of: AD-39696.1 (SEQ ID NO: 587), or a modified or unmodified variant thereof.

[1459] A RNAi agent comprising a first and a second strand, wherein the sequence of the first strand is the sequence of a first strand of: AD-39702.1 (SEQ ID NO: 588), or a modified or unmodified variant thereof.

[1460] A RNAi agent comprising a first and a second strand, wherein the sequence of the first strand is the sequence of a first strand of: AD-39708.1 (SEQ ID NO: 589), or a modified or unmodified variant thereof.

[1461] A RNAi agent comprising a first and a second strand, wherein the sequence of the first strand is the sequence of a first strand of: AD-39714.1 (SEQ ID NO: 590), or a modified or unmodified variant thereof.

[1462] A RNAi agent comprising a first and a second strand, wherein the sequence of the first strand is the sequence of a first strand of: AD-39720.1 (SEQ ID NO: 591), or a modified or unmodified variant thereof.

[1463] A RNAi agent comprising a first and a second strand, wherein the sequence of the first strand is the sequence of a first strand of: AD-39726.1 (SEQ ID NO: 592), or a modified or unmodified variant thereof.

[1464] A RNAi agent comprising a first and a second strand, wherein the sequence of the first strand is the sequence of a first strand of: AD-39685.1 (SEQ ID NO: 593), or a modified or

[1465] A RNAi agent comprising a first and a second strand, wherein the sequence of the first strand is the sequence of a first strand of: AD-39691.1 (SEQ ID NO: 594), or a modified or unmodified variant thereof.

[1466] A RNAi agent comprising a first and a second strand, wherein the sequence of the first strand is the sequence of a first strand of: AD-39697.1 (SEQ ID NO: 595), or a modified or unmodified variant thereof.

[1467] A RNAi agent comprising a first and a second strand, wherein the sequence of the first strand is the sequence of a first strand of: AD-39703.1 (SEQ ID NO: 596), or a modified or unmodified variant thereof.

[1468] A RNAi agent comprising a first and a second strand, wherein the sequence of the first strand is the sequence of a first strand of: AD-39709.1 (SEQ ID NO: 597), or a modified or unmodified variant thereof.

[1469] A RNAi agent comprising a first and a second strand, wherein the sequence of the first strand is the sequence of a first strand of: AD-39715.1 (SEQ ID NO: 598), or a modified or unmodified variant thereof.

[1470] A RNAi agent comprising a first and a second strand, wherein the sequence of the first strand is the sequence of a first strand of: AD-39721.1 (SEQ ID NO: 599), or a modified or unmodified variant thereof.

[1471] A RNAi agent comprising a first and a second strand, wherein the sequence of the first strand is the sequence of a first strand of: AD-39727.1 (SEQ ID NO: 600), or a modified or unmodified variant thereof.

[1472] A RNAi agent comprising a first and a second strand, wherein the sequence of the first strand is the sequence of a first strand of: AD-39686.1 (SEQ ID NO: 601), or a modified or unmodified variant thereof.

[1473] A RNAi agent comprising a first and a second strand, wherein the sequence of the first strand is the sequence of a first strand of: AD-39692.1 (SEQ ID NO: 602), or a modified or unmodified variant thereof.

[1474] A RNAi agent comprising a first and a second strand, wherein the sequence of the first strand is the sequence of a first strand of: AD-39698.1 (SEQ ID NO: 603), or a modified or unmodified variant thereof.

[1475] A RNAi agent comprising a first and a second strand, wherein the sequence of the first strand is the sequence of a first strand of: AD-39704.1 (SEQ ID NO: 604), or a modified or unmodified variant thereof.

[1476] A RNAi agent comprising a first and a second strand, wherein the sequence of the first strand is the sequence of a first strand of: AD-39710.1 (SEQ ID NO: 605), or a modified or unmodified variant thereof.

[1477] A RNAi agent comprising a first and a second strand, wherein the sequence of the first strand is the sequence of a first strand of: AD-39716.1 (SEQ ID NO: 606), or a modified or unmodified variant thereof.

[1478] A RNAi agent comprising a first and a second strand, wherein the sequence of the first strand is the sequence of a first strand of: AD-39722.1 (SEQ ID NO: 607), or a modified or unmodified variant thereof.

[1479] A RNAi agent comprising a first and a second strand, wherein the sequence of the first strand is the sequence of a first strand of: AD-39728.1 (SEQ ID NO: 608), or a modified or unmodified variant thereof.

[1480] A RNAi agent comprising a first and a second strand, wherein the sequence of the first strand is the sequence of a first strand of: AD-39687.1 (SEQ ID NO: 609), or a modified or unmodified variant thereof.

[1481] A RNAi agent comprising a first and a second strand, wherein the sequence of the first strand is the sequence of a first strand of: AD-39693.1 (SEQ ID NO: 610), or a modified or unmodified variant thereof.

[1482] A RNAi agent comprising a first and a second strand, wherein the sequence of the first strand is the sequence of a first strand of: AD-39699.1 (SEQ ID NO: 611), or a modified or unmodified variant thereof.

[1483] A RNAi agent comprising a first and a second strand, wherein the sequence of the first strand is the sequence of a first strand of: AD-39705.1 (SEQ ID NO: 612), or a modified or unmodified variant thereof.

[1484] A RNAi agent comprising a first and a second strand, wherein the sequence of the first strand is the sequence of a first strand of: AD-39711.1 (SEQ ID NO: 613), or a modified or unmodified variant thereof.

[1485] A RNAi agent comprising a first and a second strand, wherein the sequence of the first strand is the sequence of a first strand of: AD-39717.1 (SEQ ID NO: 614), or a modified or unmodified variant thereof.

[1486] A RNAi agent comprising a first and a second strand, wherein the sequence of the first strand is the sequence of a first strand of: AD-39723.1 (SEQ ID NO: 615), or a modified or unmodified variant thereof.

[1487] A RNAi agent comprising a first and a second strand, wherein the sequence of the first strand is the sequence of a first strand of: AD-39729.1 (SEQ ID NO: 616), or a modified or unmodified variant thereof.

[1488] A RNAi agent comprising a first and a second strand, wherein the sequence of the first strand is the sequence of a first strand of: AD-39688.1 (SEQ ID NO: 617), or a modified or unmodified variant thereof.

[1489] A RNAi agent comprising a first and a second strand, wherein the sequence of the first strand is the sequence of a first strand of: AD-39694.1 (SEQ ID NO: 618), or a modified or unmodified variant thereof.

[1490] A RNAi agent comprising a first and a second strand, wherein the sequence of the first strand is the sequence of a first strand of: AD-39700.1 (SEQ ID NO: 619), or a modified or unmodified variant thereof.

[1491] A RNAi agent comprising a first and a second strand, wherein the sequence of the first strand is the sequence of a first strand of: AD-39706.1 (SEQ ID NO: 620), or a modified or unmodified variant thereof.

[1492] A RNAi agent comprising a first and a second strand, wherein the sequence of the first strand is the sequence of a first strand of: AD-39712.1 (SEQ ID NO: 621), or a modified or unmodified variant thereof.

[1493] A RNAi agent comprising a first and a second strand, wherein the sequence of the first strand is the sequence of a first strand of: AD-39718.1 (SEQ ID NO: 622), or a modified or unmodified variant thereof.

[1494] A RNAi agent comprising a first and a second strand, wherein the sequence of the first strand is the sequence of a first strand of: AD-39724.1 (SEQ ID NO: 623), or a modified or unmodified variant thereof.

[1495] A RNAi agent comprising a first and a second strand, wherein the sequence of the first strand is the sequence of a first strand of: AD-39730.1 (SEQ ID NO: 624), or a modified or unmodified variant thereof.

[1496] A RNAi agent comprising a first and a second strand, wherein the sequence of the first strand is the sequence of a first strand of: AD-39736.1 (SEQ ID NO: 625), or a modified or unmodified variant thereof.

[1497] A RNAi agent comprising a first and a second strand, wherein the sequence of the first strand is the sequence of a first strand of: AD-39742.1 (SEQ ID NO: 626), or a modified or unmodified variant thereof.

[1498] A RNAi agent comprising a first and a second strand, wherein the sequence of the first strand is the sequence of a first strand of: AD-39748.1 (SEQ ID NO: 627), or a modified or unmodified variant thereof.

[1499] A RNAi agent comprising a first and a second strand, wherein the sequence of the first strand is the sequence of a first strand of: AD-39754.1 (SEQ ID NO: 628), or a modified or unmodified variant thereof.

[1500] A RNAi agent comprising a first and a second strand, wherein the sequence of the first strand is the sequence of a first strand of: AD-39760.1 (SEQ ID NO: 629), or a modified or unmodified variant thereof.

[1501] A RNAi agent comprising a first and a second strand, wherein the sequence of the first strand is the sequence of a first strand of: AD-39766.1 (SEQ ID NO: 630), or a modified or unmodified variant thereof.

[1502] A RNAi agent comprising a first and a second strand, wherein the sequence of the first strand is the sequence of a first strand of: AD-39772.1 (SEQ ID NO: 631), or a modified or unmodified variant thereof.

[1503] A RNAi agent comprising a first and a second strand, wherein the sequence of the first strand is the sequence of a first strand of: AD-39731.1 (SEQ ID NO: 632), or a modified or unmodified variant thereof.

[1504] A RNAi agent comprising a first and a second strand, wherein the sequence of the first strand is the sequence of a first strand of: AD-39737.1 (SEQ ID NO: 633), or a modified or unmodified variant thereof.

[1505] A RNAi agent comprising a first and a second strand, wherein the sequence of the first strand is the sequence of a first strand of: AD-39743.1 (SEQ ID NO: 634), or a modified or

[1506] A RNAi agent comprising a first and a second strand, wherein the sequence of the first strand is the sequence of a first strand of: AD-39749.1 (SEQ ID NO: 635), or a modified or unmodified variant thereof.

[1507] A RNAi agent comprising a first and a second strand, wherein the sequence of the first strand is the sequence of a first strand of: AD-39755.1 (SEQ ID NO: 636), or a modified or unmodified variant thereof.

[1508] A RNAi agent comprising a first and a second strand, wherein the sequence of the first strand is the sequence of a first strand of: AD-39761.1 (SEQ ID NO: 637), or a modified or unmodified variant thereof.

[1509] A RNAi agent comprising a first and a second strand, wherein the sequence of the first strand is the sequence of a first strand of: AD-39767.1 (SEQ ID NO: 638), or a modified or unmodified variant thereof.

[1510] A RNAi agent comprising a first and a second strand, wherein the sequence of the first strand is the sequence of a first strand of: AD-39773.1 (SEQ ID NO: 639), or a modified or unmodified variant thereof.

[1511] A RNAi agent comprising a first and a second strand, wherein the sequence of the first strand is the sequence of a first strand of: AD-39732.1 (SEQ ID NO: 640), or a modified or unmodified variant thereof.

[1512] A RNAi agent comprising a first and a second strand, wherein the sequence of the first strand is the sequence of a first strand of: AD-39738.1 (SEQ ID NO: 641), or a modified or unmodified variant thereof.

[1513] A RNAi agent comprising a first and a second strand, wherein the sequence of the first strand is the sequence of a first strand of: AD-39744.1 (SEQ ID NO: 642), or a modified or unmodified variant thereof.

[1514] A RNAi agent comprising a first and a second strand, wherein the sequence of the first strand is the sequence of a first strand of: AD-39750.1 (SEQ ID NO: 643), or a modified or unmodified variant thereof.

[1515] A RNAi agent comprising a first and a second strand, wherein the sequence of the first strand is the sequence of a first strand of: AD-39756.1 (SEQ ID NO: 644), or a modified or unmodified variant thereof.

[1516] A RNAi agent comprising a first and a second strand, wherein the sequence of the first strand is the sequence of a first strand of: AD-39762.1 (SEQ ID NO: 645), or a modified or unmodified variant thereof.

[1517] A RNAi agent comprising a first and a second strand, wherein the sequence of the first strand is the sequence of a first strand of: AD-39768.1 (SEQ ID NO: 646), or a modified or unmodified variant thereof.

[1518] A RNAi agent comprising a first and a second strand, wherein the sequence of the first strand is the sequence of a first strand of: AD-39774.1 (SEQ ID NO: 647), or a modified or unmodified variant thereof.

[1519] A RNAi agent comprising a first and a second strand, wherein the sequence of the first strand is the sequence of a first strand of: AD-39733.1 (SEQ ID NO: 648), or a modified or unmodified variant thereof.

[1520] A RNAi agent comprising a first and a second strand, wherein the sequence of the first strand is the sequence of a first strand of: AD-39739.1 (SEQ ID NO: 649), or a modified or unmodified variant thereof.

[1521] A RNAi agent comprising a first and a second strand, wherein the sequence of the first strand is the sequence of a first strand of: AD-39745.1 (SEQ ID NO: 650), or a modified or unmodified variant thereof.

[1522] A RNAi agent comprising a first and a second strand, wherein the sequence of the first strand is the sequence of a first strand of: AD-39751.1 (SEQ ID NO: 651), or a modified or unmodified variant thereof.

[1523] A RNAi agent comprising a first and a second strand, wherein the sequence of the first strand is the sequence of a first strand of: AD-39757.1 (SEQ ID NO: 652), or a modified or unmodified variant thereof.

[1524] A RNAi agent comprising a first and a second strand, wherein the sequence of the first strand is the sequence of a first strand of: AD-39763.1 (SEQ ID NO: 653), or a modified or unmodified variant thereof.

[1525] A RNAi agent comprising a first and a second strand, wherein the sequence of the first strand is the sequence of a first strand of: AD-39769.1 (SEQ ID NO: 654), or a modified or unmodified variant thereof.

[1526] A RNAi agent comprising a first and a second strand, wherein the sequence of the first strand is the sequence of a first strand of: AD-39775.1 (SEQ ID NO: 655), or a modified or unmodified variant thereof.

[1527] A RNAi agent comprising a first and a second strand, wherein the sequence of the first strand is the sequence of a first strand of: AD-39734.1 (SEQ ID NO: 656), or a modified or unmodified variant thereof.

[1528] A RNAi agent comprising a first and a second strand, wherein the sequence of the first strand is the sequence of a first strand of: AD-39740.1 (SEQ ID NO: 657), or a modified or unmodified variant thereof.

[1529] A RNAi agent comprising a first and a second strand, wherein the sequence of the first strand is the sequence of a first strand of: AD-39746.1 (SEQ ID NO: 658), or a modified or unmodified variant thereof.

[1530] A RNAi agent comprising a first and a second strand, wherein the sequence of the first strand is the sequence of a first strand of: AD-39752.1 (SEQ ID NO: 659), or a modified or unmodified variant thereof.

[1531] A RNAi agent comprising a first and a second strand, wherein the sequence of the first strand is the sequence of a first strand of: AD-39758.1 (SEQ ID NO: 660), or a modified or unmodified variant thereof.

[1532] A RNAi agent comprising a first and a second strand, wherein the sequence of the first strand is the sequence of a first strand of: AD-39764.1 (SEQ ID NO: 661), or a modified or unmodified variant thereof.

[1533] A RNAi agent comprising a first and a second strand, wherein the sequence of the first strand is the sequence of a first strand of: AD-39770.1 (SEQ ID NO: 662), or a modified or unmodified variant thereof.

[1534] A RNAi agent comprising a first and a second strand, wherein the sequence of the first strand is the sequence of a first strand of: AD-39776.1 (SEQ ID NO: 663), or a modified or unmodified variant thereof.

[1535] A RNAi agent comprising a first and a second strand, wherein the sequence of the first strand is the sequence of a first strand of: AD-39735.1 (SEQ ID NO: 664), or a modified or unmodified variant thereof.

[1536] A RNAi agent comprising a first and a second strand, wherein the sequence of the first strand is the sequence of a first strand of: AD-39741.1 (SEQ ID NO: 665), or a modified or unmodified variant thereof.

[1537] A RNAi agent comprising a first and a second strand, wherein the sequence of the first strand is the sequence of a first strand of: AD-39747.1 (SEQ ID NO: 666), or a modified or unmodified variant thereof.

[1538] A RNAi agent comprising a first and a second strand, wherein the sequence of the first strand is the sequence of a first strand of: AD-39753.1 (SEQ ID NO: 667), or a modified or unmodified variant thereof.

[1539] A RNAi agent comprising a first and a second strand, wherein the sequence of the first strand is the sequence of a first strand of: AD-39759.1 (SEQ ID NO: 668), or a modified or unmodified variant thereof.

[1540] A RNAi agent comprising a first and a second strand, wherein the sequence of the first strand is the sequence of a first strand of: AD-39765.1 (SEQ ID NO: 669), or a modified or unmodified variant thereof.

[1541] A RNAi agent comprising a first and a second strand, wherein the sequence of the first strand is the sequence of a first strand of: AD-39771.1 (SEQ ID NO: 670), or a modified or unmodified variant thereof.

[1542] A RNAi agent comprising a first and a second strand, wherein the sequence of the first strand is the sequence of a first strand of: AD-39778.1 (SEQ ID NO: 671), or a modified or unmodified variant thereof.

[1543] A RNAi agent comprising a first and a second strand, wherein the sequence of the first strand is the sequence of a first strand of: AD-39784.1 (SEQ ID NO: 672), or a modified or unmodified variant thereof.

[1544] A RNAi agent comprising a first and a second strand, wherein the sequence of the first strand is the sequence of a first strand of: AD-39790.1 (SEQ ID NO: 673), or a modified or unmodified variant thereof.

[1545] A RNAi agent comprising a first and a second strand, wherein the sequence of the first strand is the sequence of a first strand of: AD-39796.1 (SEQ ID NO: 674), or a modified or unmodified variant thereof.

[1546] A RNAi agent comprising a first and a second strand, wherein the sequence of the first strand is the sequence of a first strand of: AD-39802.1 (SEQ ID NO: 675), or a modified or

[1547] A RNAi agent comprising a first and a second strand, wherein the sequence of the first strand is the sequence of a first strand of: AD-39808.1 (SEQ ID NO: 676), or a modified or unmodified variant thereof.

[1548] A RNAi agent comprising a first and a second strand, wherein the sequence of the first strand is the sequence of a first strand of: AD-39814.1 (SEQ ID NO: 677), or a modified or unmodified variant thereof.

[1549] A RNAi agent comprising a first and a second strand, wherein the sequence of the first strand is the sequence of a first strand of: AD-39820.1 (SEQ ID NO: 678), or a modified or unmodified variant thereof.

[1550] A RNAi agent comprising a first and a second strand, wherein the sequence of the first strand is the sequence of a first strand of: AD-39779.1 (SEQ ID NO: 679), or a modified or unmodified variant thereof.

[1551] A RNAi agent comprising a first and a second strand, wherein the sequence of the first strand is the sequence of a first strand of: AD-39785.1 (SEQ ID NO: 680), or a modified or unmodified variant thereof.

[1552] A RNAi agent comprising a first and a second strand, wherein the sequence of the first strand is the sequence of a first strand of: AD-39791.1 (SEQ ID NO: 681), or a modified or unmodified variant thereof.

[1553] A RNAi agent comprising a first and a second strand, wherein the sequence of the first strand is the sequence of a first strand of: AD-39797.1 (SEQ ID NO: 682), or a modified or unmodified variant thereof.

[1554] A RNAi agent comprising a first and a second strand, wherein the sequence of the first strand is the sequence of a first strand of: AD-39803.1 (SEQ ID NO: 683), or a modified or unmodified variant thereof.

[1555] A RNAi agent comprising a first and a second strand, wherein the sequence of the first strand is the sequence of a first strand of: AD-39809.1 (SEQ ID NO: 684), or a modified or unmodified variant thereof.

[1556] A RNAi agent comprising a first and a second strand, wherein the sequence of the first strand is the sequence of a first strand of: AD-39815.1 (SEQ ID NO: 685), or a modified or unmodified variant thereof.

[1557] A RNAi agent comprising a first and a second strand, wherein the sequence of the first strand is the sequence of a first strand of: AD-39821.1 (SEQ ID NO: 686), or a modified or unmodified variant thereof.

[1558] A RNAi agent comprising a first and a second strand, wherein the sequence of the first strand is the sequence of a first strand of: AD-39780.1 (SEQ ID NO: 687), or a modified or unmodified variant thereof.

[1559] A RNAi agent comprising a first and a second strand, wherein the sequence of the first strand is the sequence of a first strand of: AD-39786.1 (SEQ ID NO: 688), or a modified or unmodified variant thereof.

[1560] A RNAi agent comprising a first and a second strand, wherein the sequence of the first strand is the sequence of a first strand of: AD-39792.1 (SEQ ID NO: 689), or a modified or unmodified variant thereof.

[1561] A RNAi agent comprising a first and a second strand, wherein the sequence of the first strand is the sequence of a first strand of: AD-39798.1 (SEQ ID NO: 690), or a modified or unmodified variant thereof.

[1562] A RNAi agent comprising a first and a second strand, wherein the sequence of the first strand is the sequence of a first strand of: AD-39804.1 (SEQ ID NO: 691), or a modified or unmodified variant thereof.

[1563] A RNAi agent comprising a first and a second strand, wherein the sequence of the first strand is the sequence of a first strand of: AD-39810.1 (SEQ ID NO: 692), or a modified or unmodified variant thereof.

[1564] A RNAi agent comprising a first and a second strand, wherein the sequence of the first strand is the sequence of a first strand of: AD-39816.1 (SEQ ID NO: 693), or a modified or unmodified variant thereof.

[1565] A RNAi agent comprising a first and a second strand, wherein the sequence of the first strand is the sequence of a first strand of: AD-39822.1 (SEQ ID NO: 694), or a modified or unmodified variant thereof.

[1566] A RNAi agent comprising a first and a second strand, wherein the sequence of the first strand is the sequence of a first strand of: AD-39781.1 (SEQ ID NO: 695), or a modified or unmodified variant thereof.

[1567] A RNAi agent comprising a first and a second strand, wherein the sequence of the first strand is the sequence of a first strand of: AD-39787.1 (SEQ ID NO: 696), or a modified or unmodified variant thereof.

[1568] A RNAi agent comprising a first and a second strand, wherein the sequence of the first strand is the sequence of a first strand of: AD-39793.1 (SEQ ID NO: 697), or a modified or unmodified variant thereof.

[1569] A RNAi agent comprising a first and a second strand, wherein the sequence of the first strand is the sequence of a first strand of: AD-39799.1 (SEQ ID NO: 698), or a modified or unmodified variant thereof.

[1570] A RNAi agent comprising a first and a second strand, wherein the sequence of the first strand is the sequence of a first strand of: AD-39805.1 (SEQ ID NO: 699), or a modified or unmodified variant thereof.

[1571] A RNAi agent comprising a first and a second strand, wherein the sequence of the first strand is the sequence of a first strand of: AD-39811.1 (SEQ ID NO: 700), or a modified or unmodified variant thereof.

[1572] A RNAi agent comprising a first and a second strand, wherein the sequence of the first strand is the sequence of a first strand of: AD-39817.1 (SEQ ID NO: 701), or a modified or unmodified variant thereof.

[1573] A RNAi agent comprising a first and a second strand, wherein the sequence of the first strand is the sequence of a first strand of: AD-39823.1 (SEQ ID NO: 702), or a modified or unmodified variant thereof.

[1574] A RNAi agent comprising a first and a second strand, wherein the sequence of the first strand is the sequence of a first strand of: AD-39782.1 (SEQ ID NO: 703), or a modified or unmodified variant thereof.

[1575] A RNAi agent comprising a first and a second strand, wherein the sequence of the first strand is the sequence of a first strand of: AD-39788.1 (SEQ ID NO: 704), or a modified or unmodified variant thereof.

[1576] A RNAi agent comprising a first and a second strand, wherein the sequence of the first strand is the sequence of a first strand of: AD-39794.1 (SEQ ID NO: 705), or a modified or unmodified variant thereof.

[1577] A RNAi agent comprising a first and a second strand, wherein the sequence of the first strand is the sequence of a first strand of: AD-39800.1 (SEQ ID NO: 706), or a modified or unmodified variant thereof.

[1578] A RNAi agent comprising a first and a second strand, wherein the sequence of the first strand is the sequence of a first strand of: AD-39806.1 (SEQ ID NO: 707), or a modified or unmodified variant thereof.

[1579] A RNAi agent comprising a first and a second strand, wherein the sequence of the first strand is the sequence of a first strand of: AD-39812.1 (SEQ ID NO: 708), or a modified or unmodified variant thereof.

[1580] A RNAi agent comprising a first and a second strand, wherein the sequence of the first strand is the sequence of a first strand of: AD-39818.1 (SEQ ID NO: 709), or a modified or unmodified variant thereof.

[1581] A RNAi agent comprising a first and a second strand, wherein the sequence of the first strand is the sequence of a first strand of: AD-39824.1 (SEQ ID NO: 710), or a modified or unmodified variant thereof.

[1582] A RNAi agent comprising a first and a second strand, wherein the sequence of the first strand is the sequence of a first strand of: AD-39783.1 (SEQ ID NO: 711), or a modified or unmodified variant thereof.

[1583] A RNAi agent comprising a first and a second strand, wherein the sequence of the first strand is the sequence of a first strand of: AD-39789.1 (SEQ ID NO: 712), or a modified or unmodified variant thereof.

[1584] A RNAi agent comprising a first and a second strand, wherein the sequence of the first strand is the sequence of a first strand of: AD-39795.1 (SEQ ID NO: 713), or a modified or unmodified variant thereof.

[1585] A RNAi agent comprising a first and a second strand, wherein the sequence of the first strand is the sequence of a first strand of: AD-39801.1 (SEQ ID NO: 714), or a modified or unmodified variant thereof.

[1586] A RNAi agent comprising a first and a second strand, wherein the sequence of the first strand is the sequence of a first strand of: AD-39807.1 (SEQ ID NO: 715), or a modified or unmodified variant thereof.

[1587] A RNAi agent comprising a first and a second strand, wherein the sequence of the first strand is the sequence of a first strand of: AD-39813.1 (SEQ ID NO: 716), or a modified or

[1588] A RNAi agent comprising a first and a second strand, wherein the sequence of the first strand is the sequence of a first strand of: AD-39819.1 (SEQ ID NO: 717), or a modified or unmodified variant thereof.

[1589] A RNAi agent comprising a first and a second strand, wherein the sequence of the first strand is the sequence of a first strand of: AD-39825.1 (SEQ ID NO: 718), or a modified or unmodified variant thereof.

[1590] A RNAi agent comprising a first and a second strand, wherein the sequence of the first strand is the sequence of a first strand of: AD-39831.1 (SEQ ID NO: 719), or a modified or unmodified variant thereof.

[1591] A RNAi agent comprising a first and a second strand, wherein the sequence of the first strand is the sequence of a first strand of: AD-39837.1 (SEQ ID NO: 720), or a modified or unmodified variant thereof.

[1592] A RNAi agent comprising a first and a second strand, wherein the sequence of the first strand is the sequence of a first strand of: AD-39843.1 (SEQ ID NO: 721), or a modified or unmodified variant thereof.

[1593] A RNAi agent comprising a first and a second strand, wherein the sequence of the first strand is the sequence of a first strand of: AD-39849.1 (SEQ ID NO: 722), or a modified or unmodified variant thereof.

[1594] A RNAi agent comprising a first and a second strand, wherein the sequence of the first strand is the sequence of a first strand of: AD-39855.1 (SEQ ID NO: 723), or a modified or unmodified variant thereof.

[1595] A RNAi agent comprising a first and a second strand, wherein the sequence of the first strand is the sequence of a first strand of: AD-39861.1 (SEQ ID NO: 724), or a modified or unmodified variant thereof.

[1596] A RNAi agent comprising a first and a second strand, wherein the sequence of the first strand is the sequence of a first strand of: AD-39867.1 (SEQ ID NO: 725), or a modified or unmodified variant thereof.

[1597] A RNAi agent comprising a first and a second strand, wherein the sequence of the first strand is the sequence of a first strand of: AD-39826.1 (SEQ ID NO: 726), or a modified or unmodified variant thereof.

[1598] A RNAi agent comprising a first and a second strand, wherein the sequence of the first strand is the sequence of a first strand of: AD-39832.1 (SEQ ID NO: 727), or a modified or unmodified variant thereof.

[1599] A RNAi agent comprising a first and a second strand, wherein the sequence of the first strand is the sequence of a first strand of: AD-39838.1 (SEQ ID NO: 728), or a modified or unmodified variant thereof.

[1600] A RNAi agent comprising a first and a second strand, wherein the sequence of the first strand is the sequence of a first strand of: AD-39844.1 (SEQ ID NO: 729), or a modified or unmodified variant thereof.

[1601] A RNAi agent comprising a first and a second strand, wherein the sequence of the first strand is the sequence of a first strand of: AD-39850.1 (SEQ ID NO: 730), or a modified or unmodified variant thereof.

[1602] A RNAi agent comprising a first and a second strand, wherein the sequence of the first strand is the sequence of a first strand of: AD-39856.1 (SEQ ID NO: 731), or a modified or unmodified variant thereof.

[1603] A RNAi agent comprising a first and a second strand, wherein the sequence of the first strand is the sequence of a first strand of: AD-39862.1 (SEQ ID NO: 732), or a modified or unmodified variant thereof.

[1604] A RNAi agent comprising a first and a second strand, wherein the sequence of the first strand is the sequence of a first strand of: AD-39868.1 (SEQ ID NO: 733), or a modified or unmodified variant thereof.

[1605] A RNAi agent comprising a first and a second strand, wherein the sequence of the first strand is the sequence of a first strand of: AD-39827.1 (SEQ ID NO: 734), or a modified or unmodified variant thereof.

[1606] A RNAi agent comprising a first and a second strand, wherein the sequence of the first strand is the sequence of a first strand of: AD-39833.1 (SEQ ID NO: 735), or a modified or unmodified variant thereof.

[1607] A RNAi agent comprising a first and a second strand, wherein the sequence of the first strand is the sequence of a first strand of: AD-39839.1 (SEQ ID NO: 736), or a modified or unmodified variant thereof.

[1608] A RNAi agent comprising a first and a second strand, wherein the sequence of the first strand is the sequence of a first strand of: AD-39845.1 (SEQ ID NO: 737), or a modified or unmodified variant thereof.

[1609] A RNAi agent comprising a first and a second strand, wherein the sequence of the first strand is the sequence of a first strand of: AD-39851.1 (SEQ ID NO: 738), or a modified or unmodified variant thereof.

[1610] A RNAi agent comprising a first and a second strand, wherein the sequence of the first strand is the sequence of a first strand of: AD-39857.1 (SEQ ID NO: 739), or a modified or unmodified variant thereof.

[1611] A RNAi agent comprising a first and a second strand, wherein the sequence of the first strand is the sequence of a first strand of: AD-39863.1 (SEQ ID NO: 740), or a modified or unmodified variant thereof.

[1612] A RNAi agent comprising a first and a second strand, wherein the sequence of the first strand is the sequence of a first strand of: AD-39869.1 (SEQ ID NO: 741), or a modified or unmodified variant thereof.

[1613] A RNAi agent comprising a first and a second strand, wherein the sequence of the first strand is the sequence of a first strand of: AD-39828.1 (SEQ ID NO: 742), or a modified or unmodified variant thereof.

[1614] A RNAi agent comprising a first and a second strand, wherein the sequence of the first strand is the sequence of a first strand of: AD-39834.1 (SEQ ID NO: 743), or a modified or unmodified variant thereof.

[1615] A RNAi agent comprising a first and a second strand, wherein the sequence of the first strand is the sequence of a first strand of: AD-39840.1 (SEQ ID NO: 744), or a modified or unmodified variant thereof.

[1616] A RNAi agent comprising a first and a second strand, wherein the sequence of the first strand is the sequence of a first strand of: AD-39846.1 (SEQ ID NO: 745), or a modified or unmodified variant thereof.

[1617] A RNAi agent comprising a first and a second strand, wherein the sequence of the first strand is the sequence of a first strand of: AD-39852.1 (SEQ ID NO: 746), or a modified or unmodified variant thereof.

[1618] A RNAi agent comprising a first and a second strand, wherein the sequence of the first strand is the sequence of a first strand of: AD-39858.1 (SEQ ID NO: 747), or a modified or unmodified variant thereof.

[1619] A RNAi agent comprising a first and a second strand, wherein the sequence of the first strand is the sequence of a first strand of: AD-39864.1 (SEQ ID NO: 748), or a modified or unmodified variant thereof.

[1620] A RNAi agent comprising a first and a second strand, wherein the sequence of the first strand is the sequence of a first strand of: AD-39870.1 (SEQ ID NO: 749), or a modified or unmodified variant thereof.

[1621] A RNAi agent comprising a first and a second strand, wherein the sequence of the first strand is the sequence of a first strand of: AD-39829.1 (SEQ ID NO: 750), or a modified or unmodified variant thereof.

[1622] A RNAi agent comprising a first and a second strand, wherein the sequence of the first strand is the sequence of a first strand of: AD-39835.1 (SEQ ID NO: 751), or a modified or unmodified variant thereof.

[1623] A RNAi agent comprising a first and a second strand, wherein the sequence of the first strand is the sequence of a first strand of: AD-39841.1 (SEQ ID NO: 752), or a modified or unmodified variant thereof.

[1624] A RNAi agent comprising a first and a second strand, wherein the sequence of the first strand is the sequence of a first strand of: AD-39853.1 (SEQ ID NO: 753), or a modified or unmodified variant thereof.

[1625] A RNAi agent comprising a first and a second strand, wherein the sequence of the first strand is the sequence of a first strand of: AD-39859.1 (SEQ ID NO: 754), or a modified or unmodified variant thereof.

[1626] A RNAi agent comprising a first and a second strand, wherein the sequence of the first strand is the sequence of a first strand of: AD-39865.1 (SEQ ID NO: 755), or a modified or unmodified variant thereof.

[1627] A RNAi agent comprising a first and a second strand, wherein the sequence of the first strand is the sequence of a first strand of: AD-39871.1 (SEQ ID NO: 756), or a modified or unmodified variant thereof.

[1628] A RNAi agent comprising a first and a second strand, wherein the sequence of the first strand is the sequence of a first strand of: AD-39830.1 (SEQ ID NO: 757), or a modified or

[1629] A RNAi agent comprising a first and a second strand, wherein the sequence of the first strand is the sequence of a first strand of: AD-39836.1 (SEQ ID NO: 758), or a modified or unmodified variant thereof.

[1630] A RNAi agent comprising a first and a second strand, wherein the sequence of the first strand is the sequence of a first strand of: AD-39842.1 (SEQ ID NO: 759), or a modified or unmodified variant thereof.

[1631] A RNAi agent comprising a first and a second strand, wherein the sequence of the first strand is the sequence of a first strand of: AD-39848.1 (SEQ ID NO: 760), or a modified or unmodified variant thereof.

[1632] A RNAi agent comprising a first and a second strand, wherein the sequence of the first strand is the sequence of a first strand of: AD-39854.1 (SEQ ID NO: 761), or a modified or unmodified variant thereof.

[1633] A RNAi agent comprising a first and a second strand, wherein the sequence of the first strand is the sequence of a first strand of: AD-39860.1 (SEQ ID NO: 762), or a modified or unmodified variant thereof.

[1634] A RNAi agent comprising a first and a second strand, wherein the sequence of the first strand is the sequence of a first strand of: AD-39866.1 (SEQ ID NO: 763), or a modified or unmodified variant thereof.

[1635] A RNAi agent comprising a first and a second strand, wherein the sequence of the first strand is the sequence of a first strand of: AD-39992.1 (SEQ ID NO: 764), or a modified or unmodified variant thereof.

[1636] A RNAi agent comprising a first and a second strand, wherein the sequence of the first strand is the sequence of a first strand of: AD-39998.1 (SEQ ID NO: 765), or a modified or unmodified variant thereof.

[1637] A RNAi agent comprising a first and a second strand, wherein the sequence of the first strand is the sequence of a first strand of: AD-40004.1 (SEQ ID NO: 766), or a modified or unmodified variant thereof.

[1638] A RNAi agent comprising a first and a second strand, wherein the sequence of the first strand is the sequence of a first strand of: AD-40010.1 (SEQ ID NO: 767), or a modified or unmodified variant thereof.

[1639] A RNAi agent comprising a first and a second strand, wherein the sequence of the first strand is the sequence of a first strand of: AD-40016.1 (SEQ ID NO: 768), or a modified or unmodified variant thereof.

[1640] A RNAi agent comprising a first and a second strand, wherein the sequence of the first strand is the sequence of a first strand of: AD-40022.1 (SEQ ID NO: 769), or a modified or unmodified variant thereof.

[1641] A RNAi agent comprising a first and a second strand, wherein the sequence of the first strand is the sequence of a first strand of: AD-40028.1 (SEQ ID NO: 770), or a modified or unmodified variant thereof.

[1642] A RNAi agent comprising a first and a second strand, wherein the sequence of the first strand is the sequence of a first strand of: AD-40034.1 (SEQ ID NO: 771), or a modified or unmodified variant thereof.

[1643] A RNAi agent comprising a first and a second strand, wherein the sequence of the first strand is the sequence of a first strand of: AD-39999.1 (SEQ ID NO: 772), or a modified or unmodified variant thereof.

[1644] A RNAi agent comprising a first and a second strand, wherein the sequence of the first strand is the sequence of a first strand of: AD-40005.1 (SEQ ID NO: 773), or a modified or unmodified variant thereof.

[1645] A RNAi agent comprising a first and a second strand, wherein the sequence of the first strand is the sequence of a first strand of: AD-40011.1 (SEQ ID NO: 774), or a modified or unmodified variant thereof.

[1646] A RNAi agent comprising a first and a second strand, wherein the sequence of the first strand is the sequence of a first strand of: AD-40017.1 (SEQ ID NO: 775), or a modified or unmodified variant thereof.

[1647] A RNAi agent comprising a first and a second strand, wherein the sequence of the first strand is the sequence of a first strand of: AD-40029.1 (SEQ ID NO: 776), or a modified or unmodified variant thereof.

[1648] A RNAi agent comprising a first and a second strand, wherein the sequence of the first strand is the sequence of a first strand of: AD-40035.1 (SEQ ID NO: 777), or a modified or unmodified variant thereof.

[1649] A RNAi agent comprising a first and a second strand, wherein the sequence of the first strand is the sequence of a first strand of: AD-39994.1 (SEQ ID NO: 778), or a modified or unmodified variant thereof.

[1650] A RNAi agent comprising a first and a second strand, wherein the sequence of the first strand is the sequence of a first strand of: AD-40000.1 (SEQ ID NO: 779), or a modified or unmodified variant thereof.

[1651] A RNAi agent comprising a first and a second strand, wherein the sequence of the first strand is the sequence of a first strand of: AD-40006.1 (SEQ ID NO: 780), or a modified or unmodified variant thereof.

[1652] A RNAi agent comprising a first and a second strand, wherein the sequence of the first strand is the sequence of a first strand of: AD-40012.1 (SEQ ID NO: 781), or a modified or unmodified variant thereof.

[1653] A RNAi agent comprising a first and a second strand, wherein the sequence of the first strand is the sequence of a first strand of: AD-40018.1 (SEQ ID NO: 782), or a modified or unmodified variant thereof.

[1654] A RNAi agent comprising a first and a second strand, wherein the sequence of the first strand is the sequence of a first strand of: AD-40024.1 (SEQ ID NO: 783), or a modified or unmodified variant thereof.

[1655] A RNAi agent comprising a first and a second strand, wherein the sequence of the first strand is the sequence of a first strand of: AD-40030.1 (SEQ ID NO: 784), or a modified or unmodified variant thereof.

[1656] A RNAi agent comprising a first and a second strand, wherein the sequence of the first strand is the sequence of a first strand of: AD-40036.1 (SEQ ID NO: 785), or a modified or unmodified variant thereof.

[1657] A RNAi agent comprising a first and a second strand, wherein the sequence of the first strand is the sequence of a first strand of: AD-39995.1 (SEQ ID NO: 786), or a modified or unmodified variant thereof.

[1658] A RNAi agent comprising a first and a second strand, wherein the sequence of the first strand is the sequence of a first strand of: AD-40001.1 (SEQ ID NO: 787), or a modified or unmodified variant thereof.

[1659] A RNAi agent comprising a first and a second strand, wherein the sequence of the first strand is the sequence of a first strand of: AD-40007.1 (SEQ ID NO: 788), or a modified or unmodified variant thereof.

[1660] A RNAi agent comprising a first and a second strand, wherein the sequence of the first strand is the sequence of a first strand of: AD-40013.1 (SEQ ID NO: 789), or a modified or unmodified variant thereof.

[1661] A RNAi agent comprising a first and a second strand, wherein the sequence of the first strand is the sequence of a first strand of: AD-40019.1 (SEQ ID NO: 790), or a modified or unmodified variant thereof.

[1662] A RNAi agent comprising a first and a second strand, wherein the sequence of the first strand is the sequence of a first strand of: AD-40025.1 (SEQ ID NO: 791), or a modified or unmodified variant thereof.

[1663] A RNAi agent comprising a first and a second strand, wherein the sequence of the first strand is the sequence of a first strand of: AD-40031.1 (SEQ ID NO: 792), or a modified or unmodified variant thereof.

[1664] A RNAi agent comprising a first and a second strand, wherein the sequence of the first strand is the sequence of a first strand of: AD-40037.1 (SEQ ID NO: 793), or a modified or unmodified variant thereof.

[1665] A RNAi agent comprising a first and a second strand, wherein the sequence of the first strand is the sequence of a first strand of: AD-39996.1 (SEQ ID NO: 794), or a modified or unmodified variant thereof.

[1666] A RNAi agent comprising a first and a second strand, wherein the sequence of the first strand is the sequence of a first strand of: AD-40002.1 (SEQ ID NO: 795), or a modified or unmodified variant thereof.

[1667] A RNAi agent comprising a first and a second strand, wherein the sequence of the first strand is the sequence of a first strand of: AD-40008.1 (SEQ ID NO: 796), or a modified or unmodified variant thereof.

[1668] A RNAi agent comprising a first and a second strand, wherein the sequence of the first strand is the sequence of a first strand of: AD-40014.1 (SEQ ID NO: 797), or a modified or unmodified variant thereof.

[1669] A RNAi agent comprising a first and a second strand, wherein the sequence of the first strand is the sequence of a first strand of: AD-40020.1 (SEQ ID NO: 798), or a modified or

[1670] A RNAi agent comprising a first and a second strand, wherein the sequence of the first strand is the sequence of a first strand of: AD-40026.1 (SEQ ID NO: 799), or a modified or unmodified variant thereof.

[1671] A RNAi agent comprising a first and a second strand, wherein the sequence of the first strand is the sequence of a first strand of: AD-40032.1 (SEQ ID NO: 800), or a modified or unmodified variant thereof.

[1672] A RNAi agent comprising a first and a second strand, wherein the sequence of the first strand is the sequence of a first strand of: AD-40038.1 (SEQ ID NO: 801), or a modified or unmodified variant thereof.

[1673] A RNAi agent comprising a first and a second strand, wherein the sequence of the first strand is the sequence of a first strand of: AD-39997.1 (SEQ ID NO: 802), or a modified or unmodified variant thereof.

[1674] A RNAi agent comprising a first and a second strand, wherein the sequence of the first strand is the sequence of a first strand of: AD-40009.1 (SEQ ID NO: 803), or a modified or unmodified variant thereof.

[1675] A RNAi agent comprising a first and a second strand, wherein the sequence of the first strand is the sequence of a first strand of: AD-40015.1 (SEQ ID NO: 804), or a modified or unmodified variant thereof.

[1676] A RNAi agent comprising a first and a second strand, wherein the sequence of the first strand is the sequence of a first strand of: AD-40021.1 (SEQ ID NO: 805), or a modified or unmodified variant thereof.

[1677] A RNAi agent comprising a first and a second strand, wherein the sequence of the first strand is the sequence of a first strand of: AD-40027.1 (SEQ ID NO: 806), or a modified or unmodified variant thereof.

[1678] A RNAi agent comprising a first and a second strand, wherein the sequence of the first strand is the sequence of a first strand of: AD-40033.1 (SEQ ID NO: 807), or a modified or unmodified variant thereof.

[1679] A RNAi agent comprising a first and a second strand, wherein the sequence of the first strand is the sequence of a first strand of: AD-40039.1 (SEQ ID NO: 808), or a modified or unmodified variant thereof.

[1680] A RNAi agent comprising a first and a second strand, wherein the sequence of the first strand is the sequence of a first strand of: AD-40045.1 (SEQ ID NO: 809), or a modified or unmodified variant thereof.

[1681] A RNAi agent comprising a first and a second strand, wherein the sequence of the first strand is the sequence of a first strand of: AD-40051.1 (SEQ ID NO: 810), or a modified or unmodified variant thereof.

[1682] A RNAi agent comprising a first and a second strand, wherein the sequence of the first strand is the sequence of a first strand of: AD-40057.1 (SEQ ID NO: 811), or a modified or unmodified variant thereof.

[1683] A RNAi agent comprising a first and a second strand, wherein the sequence of the first strand is the sequence of a first strand of: AD-40063.1 (SEQ ID NO: 812), or a modified or unmodified variant thereof.

[1684] A RNAi agent comprising a first and a second strand, wherein the sequence of the first strand is the sequence of a first strand of: AD-40069.1 (SEQ ID NO: 813), or a modified or unmodified variant thereof.

[1685] A RNAi agent comprising a first and a second strand, wherein the sequence of the first strand is the sequence of a first strand of: AD-40075.1 (SEQ ID NO: 814), or a modified or unmodified variant thereof.

[1686] A RNAi agent comprising a first and a second strand, wherein the sequence of the first strand is the sequence of a first strand of: AD-40081.1 (SEQ ID NO: 815), or a modified or unmodified variant thereof.

[1687] A RNAi agent comprising a first and a second strand, wherein the sequence of the first strand is the sequence of a first strand of: AD-40040.1 (SEQ ID NO: 816), or a modified or unmodified variant thereof.

[1688] A RNAi agent comprising a first and a second strand, wherein the sequence of the first strand is the sequence of a first strand of: AD-40046.1 (SEQ ID NO: 817), or a modified or unmodified variant thereof.

[1689] A RNAi agent comprising a first and a second strand, wherein the sequence of the first strand is the sequence of a first strand of: AD-40052.1 (SEQ ID NO: 818), or a modified or unmodified variant thereof.

[1690] A RNAi agent comprising a first and a second strand, wherein the sequence of the first strand is the sequence of a first strand of: AD-40058.1 (SEQ ID NO: 819), or a modified or unmodified variant thereof.

[1691] A RNAi agent comprising a first and a second strand, wherein the sequence of the first strand is the sequence of a first strand of: AD-40064.1 (SEQ ID NO: 820), or a modified or unmodified variant thereof.

[1692] A RNAi agent comprising a first and a second strand, wherein the sequence of the first strand is the sequence of a first strand of: AD-40070.1 (SEQ ID NO: 821), or a modified or unmodified variant thereof.

[1693] A RNAi agent comprising a first and a second strand, wherein the sequence of the first strand is the sequence of a first strand of: AD-40076.1 (SEQ ID NO: 822), or a modified or unmodified variant thereof.

[1694] A RNAi agent comprising a first and a second strand, wherein the sequence of the first strand is the sequence of a first strand of: AD-40082.1 (SEQ ID NO: 823), or a modified or unmodified variant thereof.

[1695] A RNAi agent comprising a first and a second strand, wherein the sequence of the first strand is the sequence of a first strand of: AD-40041.1 (SEQ ID NO: 824), or a modified or unmodified variant thereof.

[1696] A RNAi agent comprising a first and a second strand, wherein the sequence of the first strand is the sequence of a first strand of: AD-40047.1 (SEQ ID NO: 825), or a modified or unmodified variant thereof.

[1697] A RNAi agent comprising a first and a second strand, wherein the sequence of the first strand is the sequence of a first strand of: AD-40053.1 (SEQ ID NO: 826), or a modified or unmodified variant thereof.

[1698] A RNAi agent comprising a first and a second strand, wherein the sequence of the first strand is the sequence of a first strand of: AD-40059.1 (SEQ ID NO: 827), or a modified or unmodified variant thereof.

[1699] A RNAi agent comprising a first and a second strand, wherein the sequence of the first strand is the sequence of a first strand of: AD-40065.1 (SEQ ID NO: 828), or a modified or unmodified variant thereof.

[1700] A RNAi agent comprising a first and a second strand, wherein the sequence of the first strand is the sequence of a first strand of: AD-40071.1 (SEQ ID NO: 829), or a modified or unmodified variant thereof.

[1701] A RNAi agent comprising a first and a second strand, wherein the sequence of the first strand is the sequence of a first strand of: AD-40077.1 (SEQ ID NO: 830), or a modified or unmodified variant thereof.

[1702] A RNAi agent comprising a first and a second strand, wherein the sequence of the first strand is the sequence of a first strand of: AD-40083.1 (SEQ ID NO: 831), or a modified or unmodified variant thereof.

[1703] A RNAi agent comprising a first and a second strand, wherein the sequence of the first strand is the sequence of a first strand of: AD-40042.1 (SEQ ID NO: 832), or a modified or unmodified variant thereof.

[1704] A RNAi agent comprising a first and a second strand, wherein the sequence of the first strand is the sequence of a first strand of: AD-40048.1 (SEQ ID NO: 833), or a modified or unmodified variant thereof.

[1705] A RNAi agent comprising a first and a second strand, wherein the sequence of the first strand is the sequence of a first strand of: AD-40054.1 (SEQ ID NO: 834), or a modified or unmodified variant thereof.

[1706] A RNAi agent comprising a first and a second strand, wherein the sequence of the first strand is the sequence of a first strand of: AD-40060.1 (SEQ ID NO: 835), or a modified or unmodified variant thereof.

[1707] A RNAi agent comprising a first and a second strand, wherein the sequence of the first strand is the sequence of a first strand of: AD-40066.1 (SEQ ID NO: 836), or a modified or unmodified variant thereof.

[1708] A RNAi agent comprising a first and a second strand, wherein the sequence of the first strand is the sequence of a first strand of: AD-40072.1 (SEQ ID NO: 837), or a modified or unmodified variant thereof.

[1709] A RNAi agent comprising a first and a second strand, wherein the sequence of the first strand is the sequence of a first strand of: AD-40078.1 (SEQ ID NO: 838), or a modified or unmodified variant thereof.

[1710] A RNAi agent comprising a first and a second strand, wherein the sequence of the first strand is the sequence of a first strand of: AD-40084.1 (SEQ ID NO: 839), or a modified or

[1711] A RNAi agent comprising a first and a second strand, wherein the sequence of the first strand is the sequence of a first strand of: AD-40043.1 (SEQ ID NO: 840), or a modified or unmodified variant thereof.

[1712] A RNAi agent comprising a first and a second strand, wherein the sequence of the first strand is the sequence of a first strand of: AD-40049.1 (SEQ ID NO: 841), or a modified or unmodified variant thereof.

[1713] A RNAi agent comprising a first and a second strand, wherein the sequence of the first strand is the sequence of a first strand of: AD-40055.1 (SEQ ID NO: 842), or a modified or unmodified variant thereof.

[1714] A RNAi agent comprising a first and a second strand, wherein the sequence of the first strand is the sequence of a first strand of: AD-40061.1 (SEQ ID NO: 843), or a modified or unmodified variant thereof.

[1715] A RNAi agent comprising a first and a second strand, wherein the sequence of the first strand is the sequence of a first strand of: AD-40067.1 (SEQ ID NO: 844), or a modified or unmodified variant thereof.

[1716] A RNAi agent comprising a first and a second strand, wherein the sequence of the first strand is the sequence of a first strand of: AD-40073.1 (SEQ ID NO: 845), or a modified or unmodified variant thereof.

[1717] A RNAi agent comprising a first and a second strand, wherein the sequence of the first strand is the sequence of a first strand of: AD-40079.1 (SEQ ID NO: 846), or a modified or unmodified variant thereof.

[1718] A RNAi agent comprising a first and a second strand, wherein the sequence of the first strand is the sequence of a first strand of: AD-40085.1 (SEQ ID NO: 847), or a modified or unmodified variant thereof.

[1719] A RNAi agent comprising a first and a second strand, wherein the sequence of the first strand is the sequence of a first strand of: AD-40044.1 (SEQ ID NO: 848), or a modified or unmodified variant thereof.

[1720] A RNAi agent comprising a first and a second strand, wherein the sequence of the first strand is the sequence of a first strand of: AD-40050.1 (SEQ ID NO: 849), or a modified or unmodified variant thereof.

[1721] A RNAi agent comprising a first and a second strand, wherein the sequence of the first strand is the sequence of a first strand of: AD-40056.1 (SEQ ID NO: 850), or a modified or unmodified variant thereof.

[1722] A RNAi agent comprising a first and a second strand, wherein the sequence of the first strand is the sequence of a first strand of: AD-40062.1 (SEQ ID NO: 851), or a modified or unmodified variant thereof.

[1723] A RNAi agent comprising a first and a second strand, wherein the sequence of the first strand is the sequence of a first strand of: AD-40068.1 (SEQ ID NO: 852), or a modified or unmodified variant thereof.

[1724] A RNAi agent comprising a first and a second strand, wherein the sequence of the first strand is the sequence of a first strand of: AD-40074.1 (SEQ ID NO: 853), or a modified or unmodified variant thereof.

[1725] A RNAi agent comprising a first and a second strand, wherein the sequence of the first strand is the sequence of a first strand of: AD-40080.1 (SEQ ID NO: 854), or a modified or unmodified variant thereof.

[1726] A RNAi agent comprising a first and a second strand, wherein the sequence of the first strand is the sequence of a first strand of: AD-39720.1 (SEQ ID NOs: 1716 and 1754), or a modified or unmodified variant thereof.

[1727] A RNAi agent comprising a first and a second strand, wherein the sequence of the first strand is the sequence of a first strand of: AD-39706.1 (SEQ ID NOs: 1717 and 1755), or a modified or unmodified variant thereof.

[1728] A RNAi agent comprising a first and a second strand, wherein the sequence of the first strand is the sequence of a first strand of: AD-39712.1 (SEQ ID NOs: 1718 and 1756), or a modified or unmodified variant thereof.

[1729] A RNAi agent comprising a first and a second strand, wherein the sequence of the first strand is the sequence of a first strand of: AD-39760.1 (SEQ ID NOs: 1719 and 1757), or a modified or unmodified variant thereof.

[1730] A RNAi agent comprising a first and a second strand, wherein the sequence of the first strand is the sequence of a first strand of: AD-39732.1 (SEQ ID NOs: 1720 and 1758), or a modified or unmodified variant thereof.

[1731] A RNAi agent comprising a first and a second strand, wherein the sequence of the first strand is the sequence of a first strand of: AD-35541.4 (SEQ ID NOs: 1721 and 1759), or a modified or unmodified variant thereof.

[1732] A RNAi agent comprising a first and a second strand, wherein the sequence of the first strand is the sequence of a first strand of: AD-39735.1 or hs_KRAS_{—}321_A22S26 (SEQ ID NOs: 1722 and 1760), or a modified or unmodified variant thereof.

[1733] A RNAi agent comprising a first and a second strand, wherein the sequence of the first strand is the sequence of a first strand of: AD-39741.1, or modified or unmodified variants thereof.

[1734] A RNAi agent comprising a first and a second strand, wherein the sequence of the first strand is the sequence of a first strand of: hs_KRAS_{—}322_A22S26 (SEQ ID NOs: 1723 and 1761), or a modified or unmodified variant thereof.

[1735] A RNAi agent comprising a first and a second strand, wherein the sequence of the first strand is the sequence of a first strand of: AD-39778.1 (SEQ ID NOs: 1724 and 1762), or a modified or unmodified variant thereof.

[1736] A RNAi agent comprising a first and a second strand, wherein the sequence of the first strand is the sequence of a first strand of: AD-39790.1 (SEQ ID NOs: 1725 and 1763), or a modified or unmodified variant thereof.

[1737] A RNAi agent comprising a first and a second strand, wherein the sequence of the first strand is the sequence of a first strand of: AD-39822.1 (SEQ ID NOs: 1726 and 1764), or a modified or unmodified variant thereof.

[1738] A RNAi agent comprising a first and a second strand, wherein the sequence of the first strand is the sequence of a first strand of: AD-35609.4 (SEQ ID NOs: 1727 and 1765), or a modified or unmodified variant thereof.

[1739] A RNAi agent comprising a first and a second strand, wherein the sequence of the first strand is the sequence of a first strand of: AD-35581.4 (SEQ ID NOs: 1728 and 1766), or a modified or unmodified variant thereof.

[1740] A RNAi agent comprising a first and a second strand, wherein the sequence of the first strand is the sequence of a first strand of: AD-39845.1 (SEQ ID NOs: 1729 and 1767), or a modified or unmodified variant thereof.

[1741] A RNAi agent comprising a first and a second strand, wherein the sequence of the first strand is the sequence of a first strand of: AD-39858.1 (SEQ ID NOs: 1730 and 1768), or a modified or unmodified variant thereof.

[1742] A RNAi agent comprising a first and a second strand, wherein the sequence of the first strand is the sequence of a first strand of: AD-39870.1 (SEQ ID NOs: 1731 and 1769), or a modified or unmodified variant thereof.

[1743] A RNAi agent comprising a first and a second strand, wherein the sequence of the first strand is the sequence of a first strand of: AD-35576.4 (SEQ ID NOs: 1732 and 1770), or a modified or unmodified variant thereof.

[1744] A RNAi agent comprising a first and a second strand, wherein the sequence of the first strand is the sequence of a first strand of: AD-35588.4 (SEQ ID NOs: 1733 and 1771), or a modified or unmodified variant thereof.

[1745] A RNAi agent comprising a first and a second strand, wherein the sequence of the first strand is the sequence of a first strand of: AD-35600.1 (SEQ ID NOs: 1734 and 1772), or a modified or unmodified variant thereof.

[1746] A RNAi agent comprising a first and a second strand, wherein the sequence of the first strand is the sequence of a first strand of: AD-35606.1 (SEQ ID NOs: 1735 and 1773), or a modified or unmodified variant thereof.

[1747] A RNAi agent comprising a first and a second strand, wherein the sequence of the first strand is the sequence of a first strand of: AD-38151.1 (SEQ ID NOs: 1736 and 1774), or a modified or unmodified variant thereof.

[1748] A RNAi agent comprising a first and a second strand, wherein the sequence of the first strand is the sequence of a first strand of: AD-38163.1 (SEQ ID NOs: 1737 and 1775), or a modified or unmodified variant thereof.

[1749] A RNAi agent comprising a first and a second strand, wherein the sequence of the first strand is the sequence of a first strand of: AD-39999.1 (SEQ ID NOs: 1738 and 1776), or a modified or unmodified variant thereof.

[1750] A RNAi agent comprising a first and a second strand, wherein the sequence of the first strand is the sequence of a first strand of: AD-38159.1 or hs_KRAS_{—}528_A22S26 (SEQ ID NOs: 1739 and 1777), or a modified or unmodified variant thereof.

[1751] A RNAi agent comprising a first and a second strand, wherein the sequence of the first strand is the sequence of a first strand of: AD-38130.1 or hs_KRAS_{—}531_A22S26 (SEQ ID NOs: 1740 and 1778), or a modified or unmodified variant thereof.

[1752] A RNAi agent comprising a first and a second strand, wherein the sequence of the first strand is the sequence of a first strand of: AD-38136.1 (SEQ ID NOs: 1741 and 1779), or a modified or unmodified variant thereof.

[1753] A RNAi agent comprising a first and a second strand, wherein the sequence of the first strand is the sequence of a first strand of: AD-40036.1 (SEQ ID NOs: 1742 and 1780), or a modified or unmodified variant thereof.

[1754] A RNAi agent comprising a first and a second strand, wherein the sequence of the first strand is the sequence of a first strand of: AD-40008.1 (SEQ ID NOs: 1743 and 1781), or a modified or unmodified variant thereof.

[1755] A RNAi agent comprising a first and a second strand, wherein the sequence of the first strand is the sequence of a first strand of: AD-40021.1 (SEQ ID NOs: 1744 and 1782), or a modified or unmodified variant thereof.

[1756] A RNAi agent comprising a first and a second strand, wherein the sequence of the first strand is the sequence of a first strand of: AD-40077.1 (SEQ ID NOs: 1745 and 1783), or a modified or unmodified variant thereof.

[1757] A RNAi agent comprising a first and a second strand, wherein the sequence of the first strand is the sequence of a first strand of: AD-40072.1 (SEQ ID NOs: 1746 and 1784), or a modified or unmodified variant thereof.

[1758] A RNAi agent comprising a first and a second strand, wherein the sequence of the first strand is the sequence of a first strand of: AD-40061.1 (SEQ ID NOs: 1747 and 1785), or a modified or unmodified variant thereof.

[1759] A RNAi agent comprising a first and a second strand, wherein the sequence of the first strand is the sequence of a first strand of: AD-40068.1 (SEQ ID NOs: 1748 and 1786), or a modified or unmodified variant thereof.

[1760] A RNAi agent comprising a first and a second strand, wherein the sequence of the first strand is the sequence of a first strand of: AD-38131.1 (SEQ ID NOs: 1749 and 1787), or a modified or unmodified variant thereof.

[1761] A RNAi agent comprising a first and a second strand, wherein the sequence of the first strand is the sequence of a first strand of: AD-38167.1 (SEQ ID NOs: 1750 and 1788), or a modified or unmodified variant thereof.

[1762] A RNAi agent comprising a first and a second strand, wherein the sequence of the first strand is the sequence of a first strand of: hs_KRAS 1273_A22S26 (SEQ ID NOs: 1751 and 1789), or a modified or unmodified variant thereof.

[1763] A RNAi agent comprising a first and a second strand, wherein the sequence of the first strand is the sequence of a first strand of: hs_KRAS 2892_A37S26 (SEQ ID NOs: 1752 and 1790), or a modified or unmodified variant thereof.

[1764] A RNAi agent comprising a first and a second strand, wherein the sequence of the first strand is the sequence of a first strand of: hs_KRAS 4731_A22S26 (SEQ ID NOs: 1753 and 1791), or a modified or unmodified variant thereof.

[1765] Specific embodiments comprising the first and/or second strands of a RNAi agent disclosed herein

[1766] In one embodiment, the present disclosure pertains to a composition comprising any one or more of: a RNAi agent comprising a first and a second strand, wherein the sequences of the first and/or second strands comprise the sequences of a first and/or second strand of any RNAi agent from any of Tables 1 to 6, or modified and unmodified variants thereof.

[1767] Thus, in various embodiments, the present disclosure pertains to a composition comprising any one or more of the following:

[1768] A RNAi agent comprising a first and a second strand, wherein the sequences of the first and/or second strands comprise the sequences of a first and/or second strand of: AD-35523.3 (SEQ ID NOs: 1 and 428), or a modified or unmodified variant thereof.

[1769] A RNAi agent comprising a first and a second strand, wherein the sequences of the first and/or second strands comprise the sequences of a first and/or second strand of: AD-35529.1 (SEQ ID NOs: 2 and 429), or a modified or unmodified variant thereof.

[1770] A RNAi agent comprising a first and a second strand, wherein the sequences of the first and/or second strands comprise the sequences of a first and/or second strand of: AD-35535.4 (SEQ ID NOs: 3 and 430), or a modified or unmodified variant thereof.

[1771] A RNAi agent comprising a first and a second strand, wherein the sequences of the first and/or second strands comprise the sequences of a first and/or second strand of: AD-35541.4 (SEQ ID NOs: 4 and 431), or a modified or unmodified variant thereof.

[1772] A RNAi agent comprising a first and a second strand, wherein the sequences of the first and/or second strands comprise the sequences of a first and/or second strand of: AD-35547.4 (SEQ ID NOs: 5 and 432), or a modified or unmodified variant thereof.

[1773] A RNAi agent comprising a first and a second strand, wherein the sequences of the first and/or second strands comprise the sequences of a first and/or second strand of: AD-35553.4 (SEQ ID NOs: 6 and 433), or a modified or unmodified variant thereof.

[1774] A RNAi agent comprising a first and a second strand, wherein the sequences of the first and/or second strands comprise the sequences of a first and/or second strand of: AD-35559.4 (SEQ ID NOs: 7 and 434), or a modified or unmodified variant thereof.

[1775] A RNAi agent comprising a first and a second strand, wherein the sequences of the first and/or second strands comprise the sequences of a first and/or second strand of: AD-35565.4 (SEQ ID NOs: 8 and 435), or a modified or unmodified variant thereof.

[1776] A RNAi agent comprising a first and a second strand, wherein the sequences of the first and/or second strands comprise the sequences of a first and/or second strand of: AD-35524.4 (SEQ ID NOs: 9 and 436), or a modified or unmodified variant thereof.

[1777] A RNAi agent comprising a first and a second strand, wherein the sequences of the first and/or second strands comprise the sequences of a first and/or second strand of: AD-35530.4 (SEQ ID NOs: 10 and 437), or a modified or unmodified variant thereof.

[1778] A RNAi agent comprising a first and a second strand, wherein the sequences of the first and/or second strands comprise the sequences of a first and/or second strand of: AD-35536.4 (SEQ ID NOs: 11 and 438), or a modified or unmodified variant thereof.

[1779] A RNAi agent comprising a first and a second strand, wherein the sequences of the first and/or second strands comprise the sequences of a first and/or second strand of: AD-35542.4 (SEQ ID NOs: 12 and 439), or a modified or unmodified variant thereof.

[1780] A RNAi agent comprising a first and a second strand, wherein the sequences of the first and/or second strands comprise the sequences of a first and/or second strand of: AD-35548.4 (SEQ ID NOs: 13 and 440), or a modified or unmodified variant thereof.

[1781] A RNAi agent comprising a first and a second strand, wherein the sequences of the first and/or second strands comprise the sequences of a first and/or second strand of: AD-35554.4 (SEQ ID NOs: 14 and 441), or a modified or unmodified variant thereof.

[1782] A RNAi agent comprising a first and a second strand, wherein the sequences of the first and/or second strands comprise the sequences of a first and/or second strand of: AD-35560.2 (SEQ ID NOs: 15 and 442), or a modified or unmodified variant thereof.

[1783] A RNAi agent comprising a first and a second strand, wherein the sequences of the first and/or second strands comprise the sequences of a first and/or second strand of: AD-35566.4 (SEQ ID NOs: 16 and 443), or a modified or unmodified variant thereof.

[1784] A RNAi agent comprising a first and a second strand, wherein the sequences of the first and/or second strands comprise the sequences of a first and/or second strand of: AD-35525.2 (SEQ ID NOs: 17 and 444), or a modified or unmodified variant thereof.

[1785] A RNAi agent comprising a first and a second strand, wherein the sequences of the first and/or second strands comprise the sequences of a first and/or second strand of: AD-35531.4 (SEQ ID NOs: 18 and 445), or a modified or unmodified variant thereof.

[1786] A RNAi agent comprising a first and a second strand, wherein the sequences of the first and/or second strands comprise the sequences of a first and/or second strand of: AD-35537.4 (SEQ ID NOs: 19 and 446), or a modified or unmodified variant thereof.

[1787] A RNAi agent comprising a first and a second strand, wherein the sequences of the first and/or second strands comprise the sequences of a first and/or second strand of: AD-35543.2 (SEQ ID NOs: 20 and 447), or a modified or unmodified variant thereof.

[1788] A RNAi agent comprising a first and a second strand, wherein the sequences of the first and/or second strands comprise the sequences of a first and/or second strand of: AD-35549.4 (SEQ ID NOs: 21 and 448), or a modified or unmodified variant thereof.

[1789] A RNAi agent comprising a first and a second strand, wherein the sequences of the first and/or second strands comprise the sequences of a first and/or second strand of: AD-35555.4 (SEQ ID NOs: 22 and 449), or a modified or unmodified variant thereof.

[1790] A RNAi agent comprising a first and a second strand, wherein the sequences of the first and/or second strands comprise the sequences of a first and/or second strand of: AD-35561.4 (SEQ ID NOs: 23 and 450), or a modified or unmodified variant thereof.

[1791] A RNAi agent comprising a first and a second strand, wherein the sequences of the first and/or second strands comprise the sequences of a first and/or second strand of: AD-35567.4 (SEQ ID NOs: 24 and 451), or a modified or unmodified variant thereof.

[1792] A RNAi agent comprising a first and a second strand, wherein the sequences of the first and/or second strands comprise the sequences of a first and/or second strand of: AD-35526.4 (SEQ ID NOs: 25 and 452), or a modified or unmodified variant thereof.

[1793] A RNAi agent comprising a first and a second strand, wherein the sequences of the first and/or second strands comprise the sequences of a first and/or second strand of: AD-35532.4 (SEQ ID NOs: 26 and 453), or a modified or unmodified variant thereof.

[1794] A RNAi agent comprising a first and a second strand, wherein the sequences of the first and/or second strands comprise the sequences of a first and/or second strand of: AD-35538.4 (SEQ ID NOs: 27 and 454), or a modified or unmodified variant thereof.

[1795] A RNAi agent comprising a first and a second strand, wherein the sequences of the first and/or second strands comprise the sequences of a first and/or second strand of: AD-35544.4 (SEQ ID NOs: 28 and 455), or a modified or unmodified variant thereof.

[1796] A RNAi agent comprising a first and a second strand, wherein the sequences of the first and/or second strands comprise the sequences of a first and/or second strand of: AD-35550.4 (SEQ ID NOs: 29 and 456), or a modified or unmodified variant thereof.

[1797] A RNAi agent comprising a first and a second strand, wherein the sequences of the first and/or second strands comprise the sequences of a first and/or second strand of: AD-35556.4 (SEQ ID NOs: 30 and 457), or a modified or unmodified variant thereof.

[1798] A RNAi agent comprising a first and a second strand, wherein the sequences of the first and/or second strands comprise the sequences of a first and/or second strand of: AD-35562.4 (SEQ ID NOs: 31 and 458), or a modified or unmodified variant thereof.

[1799] A RNAi agent comprising a first and a second strand, wherein the sequences of the first and/or second strands comprise the sequences of a first and/or second strand of: AD-35568.4 (SEQ ID NOs: 32 and 459), or a modified or unmodified variant thereof.

[1800] A RNAi agent comprising a first and a second strand, wherein the sequences of the first and/or second strands comprise the sequences of a first and/or second strand of: AD-35527.4 (SEQ ID NOs: 33 and 460), or a modified or unmodified variant thereof.

[1801] A RNAi agent comprising a first and a second strand, wherein the sequences of the first and/or second strands comprise the sequences of a first and/or second strand of: AD-35533.4 (SEQ ID NOs: 34 and 461), or a modified or unmodified variant thereof.

[1802] A RNAi agent comprising a first and a second strand, wherein the sequences of the first and/or second strands comprise the sequences of a first and/or second strand of: AD-35539.4 (SEQ ID NOs: 35 and 462), or a modified or unmodified variant thereof.

[1803] A RNAi agent comprising a first and a second strand, wherein the sequences of the first and/or second strands comprise the sequences of a first and/or second strand of: AD-35545.4 (SEQ ID NOs: 36 and 463), or a modified or unmodified variant thereof.

[1804] A RNAi agent comprising a first and a second strand, wherein the sequences of the first and/or second strands comprise the sequences of a first and/or second strand of: AD-35551.4 (SEQ ID NOs: 37 and 464), or a modified or unmodified variant thereof.

[1805] A RNAi agent comprising a first and a second strand, wherein the sequences of the first and/or second strands comprise the sequences of a first and/or second strand of: AD-35563.4 (SEQ ID NOs: 38 and 465), or a modified or unmodified variant thereof.

[1806] A RNAi agent comprising a first and a second strand, wherein the sequences of the first and/or second strands comprise the sequences of a first and/or second strand of: AD-35528.4 (SEQ ID NOs: 39 and 466), or a modified or unmodified variant thereof.

[1807] A RNAi agent comprising a first and a second strand, wherein the sequences of the first and/or second strands comprise the sequences of a first and/or second strand of: AD-35540.4 (SEQ ID NOs: 40 and 467), or a modified or unmodified variant thereof.

[1808] A RNAi agent comprising a first and a second strand, wherein the sequences of the first and/or second strands comprise the sequences of a first and/or second strand of: AD-35546.4 (SEQ ID NOs: 41 and 468), or a modified or unmodified variant thereof.

[1809] A RNAi agent comprising a first and a second strand, wherein the sequences of the first and/or second strands comprise the sequences of a first and/or second strand of: AD-35552.4 (SEQ ID NOs: 42 and 469), or a modified or unmodified variant thereof.

[1810] A RNAi agent comprising a first and a second strand, wherein the sequences of the first and/or second strands comprise the sequences of a first and/or second strand of: AD-35558.4 (SEQ ID NOs: 43 and 470), or a modified or unmodified variant thereof.

[1811] A RNAi agent comprising a first and a second strand, wherein the sequences of the first and/or second strands comprise the sequences of a first and/or second strand of: AD-35564.4 (SEQ ID NOs: 44 and 471), or a modified or unmodified variant thereof.

[1812] A RNAi agent comprising a first and a second strand, wherein the sequences of the first and/or second strands comprise the sequences of a first and/or second strand of: AD-35570.4 (SEQ ID NOs: 45 and 472), or a modified or unmodified variant thereof.

[1813] A RNAi agent comprising a first and a second strand, wherein the sequences of the first and/or second strands comprise the sequences of a first and/or second strand of: AD-35571.4 (SEQ ID NOs: 46 and 473), or a modified or unmodified variant thereof.

[1814] A RNAi agent comprising a first and a second strand, wherein the sequences of the first and/or second strands comprise the sequences of a first and/or second strand of: AD-35577.4 (SEQ ID NOs: 47 and 474), or a modified or unmodified variant thereof.

[1815] A RNAi agent comprising a first and a second strand, wherein the sequences of the first and/or second strands comprise the sequences of a first and/or second strand of: AD-35583.4 (SEQ ID NOs: 48 and 475), or a modified or unmodified variant thereof.

[1816] A RNAi agent comprising a first and a second strand, wherein the sequences of the first and/or second strands comprise the sequences of a first and/or second strand of: AD-35589.4 (SEQ ID NOs: 49 and 476), or a modified or unmodified variant thereof.

[1817] A RNAi agent comprising a first and a second strand, wherein the sequences of the first and/or second strands comprise the sequences of a first and/or second strand of: AD-35595.4 (SEQ ID NOs: 50 and 477), or a modified or unmodified variant thereof.

[1818] A RNAi agent comprising a first and a second strand, wherein the sequences of the first and/or second strands comprise the sequences of a first and/or second strand of: AD-35601.4 (SEQ ID NOs: 51 and 478), or a modified or unmodified variant thereof.

[1819] A RNAi agent comprising a first and a second strand, wherein the sequences of the first and/or second strands comprise the sequences of a first and/or second strand of: AD-35607.4 (SEQ ID NOs: 52 and 479), or a modified or unmodified variant thereof.

[1820] A RNAi agent comprising a first and a second strand, wherein the sequences of the first and/or second strands comprise the sequences of a first and/or second strand of: AD-35613.4 (SEQ ID NOs: 53 and 480), or a modified or unmodified variant thereof.

[1821] A RNAi agent comprising a first and a second strand, wherein the sequences of the first and/or second strands comprise the sequences of a first and/or second strand of: AD-35572.4 (SEQ ID NOs: 54 and 481), or a modified or unmodified variant thereof.

[1822] A RNAi agent comprising a first and a second strand, wherein the sequences of the first and/or second strands comprise the sequences of a first and/or second strand of: AD-35578.4 (SEQ ID NOs: 55 and 482), or a modified or unmodified variant thereof.

[1823] A RNAi agent comprising a first and a second strand, wherein the sequences of the first and/or second strands comprise the sequences of a first and/or second strand of: AD-35584.4 (SEQ ID NOs: 56 and 483), or a modified or unmodified variant thereof.

[1824] A RNAi agent comprising a first and a second strand, wherein the sequences of the first and/or second strands comprise the sequences of a first and/or second strand of: AD-35590.4 (SEQ ID NOs: 57 and 484), or a modified or unmodified variant thereof.

[1825] A RNAi agent comprising a first and a second strand, wherein the sequences of the first and/or second strands comprise the sequences of a first and/or second strand of: AD-35596.4 (SEQ ID NOs: 58 and 485), or a modified or unmodified variant thereof.

[1826] A RNAi agent comprising a first and a second strand, wherein the sequences of the first and/or second strands comprise the sequences of a first and/or second strand of: AD-35602.4 (SEQ ID NOs: 59 and 486), or a modified or unmodified variant thereof.

[1827] A RNAi agent comprising a first and a second strand, wherein the sequences of the first and/or second strands comprise the sequences of a first and/or second strand of: AD-35608.4 (SEQ ID NOs: 60 and 487), or a modified or unmodified variant thereof.

[1828] A RNAi agent comprising a first and a second strand, wherein the sequences of the first and/or second strands comprise the sequences of a first and/or second strand of: AD-35614.4 (SEQ ID NOs: 61 and 488), or a modified or unmodified variant thereof.

[1829] A RNAi agent comprising a first and a second strand, wherein the sequences of the first and/or second strands comprise the sequences of a first and/or second strand of: AD-35573.4 (SEQ ID NOs: 62 and 489), or a modified or unmodified variant thereof.

[1830] A RNAi agent comprising a first and a second strand, wherein the sequences of the first and/or second strands comprise the sequences of a first and/or second strand of: AD-35579.4 (SEQ ID NOs: 63 and 490), or a modified or unmodified variant thereof.

[1831] A RNAi agent comprising a first and a second strand, wherein the sequences of the first and/or second strands comprise the sequences of a first and/or second strand of: AD-35585.4 (SEQ ID NOs: 64 and 491), or a modified or unmodified variant thereof.

[1832] A RNAi agent comprising a first and a second strand, wherein the sequences of the first and/or second strands comprise the sequences of a first and/or second strand of: AD-35591.4 (SEQ ID NOs: 65 and 492), or a modified or unmodified variant thereof.

[1833] A RNAi agent comprising a first and a second strand, wherein the sequences of the first and/or second strands comprise the sequences of a first and/or second strand of: AD-35597.4 (SEQ ID NOs: 66 and 493), or a modified or unmodified variant thereof.

[1834] A RNAi agent comprising a first and a second strand, wherein the sequences of the first and/or second strands comprise the sequences of a first and/or second strand of: AD-35603.4 (SEQ ID NOs: 67 and 494), or a modified or unmodified variant thereof.

[1835] A RNAi agent comprising a first and a second strand, wherein the sequences of the first and/or second strands comprise the sequences of a first and/or second strand of: AD-35609.4 (SEQ ID NOs: 68 and 495), or a modified or unmodified variant thereof.

[1836] A RNAi agent comprising a first and a second strand, wherein the sequences of the first and/or second strands comprise the sequences of a first and/or second strand of: AD-35615.4 (SEQ ID NOs: 69 and 496), or a modified or unmodified variant thereof.

[1837] A RNAi agent comprising a first and a second strand, wherein the sequences of the first and/or second strands comprise the sequences of a first and/or second strand of: AD-35574.4 (SEQ ID NOs: 70 and 497), or a modified or unmodified variant thereof.

[1838] A RNAi agent comprising a first and a second strand, wherein the sequences of the first and/or second strands comprise the sequences of a first and/or second strand of: AD-35580.1 (SEQ ID NOs: 71 and 498), or a modified or unmodified variant thereof.

[1839] A RNAi agent comprising a first and a second strand, wherein the sequences of the first and/or second strands comprise the sequences of a first and/or second strand of: AD-35586.4 (SEQ ID NOs: 72 and 499), or a modified or unmodified variant thereof.

[1840] A RNAi agent comprising a first and a second strand, wherein the sequences of the first and/or second strands comprise the sequences of a first and/or second strand of: AD-35592.4 (SEQ ID NOs: 73 and 500), or a modified or unmodified variant thereof.

[1841] A RNAi agent comprising a first and a second strand, wherein the sequences of the first and/or second strands comprise the sequences of a first and/or second strand of: AD-35598.4 (SEQ ID NOs: 74 and 501), or a modified or unmodified variant thereof.

[1842] A RNAi agent comprising a first and a second strand, wherein the sequences of the first and/or second strands comprise the sequences of a first and/or second strand of: AD-35604.4 (SEQ ID NOs: 75 and 502), or a modified or unmodified variant thereof.

[1843] A RNAi agent comprising a first and a second strand, wherein the sequences of the first and/or second strands comprise the sequences of a first and/or second strand of: AD-35610.4 (SEQ ID NOs: 76 and 503), or a modified or unmodified variant thereof.

[1844] A RNAi agent comprising a first and a second strand, wherein the sequences of the first and/or second strands comprise the sequences of a first and/or second strand of: AD-35616.4 (SEQ ID NOs: 77 and 504), or a modified or unmodified variant thereof.

[1845] A RNAi agent comprising a first and a second strand, wherein the sequences of the first and/or second strands comprise the sequences of a first and/or second strand of: AD-35575.4 (SEQ ID NOs: 78 and 505), or a modified or unmodified variant thereof.

[1846] A RNAi agent comprising a first and a second strand, wherein the sequences of the first and/or second strands comprise the sequences of a first and/or second strand of: AD-35581.4 (SEQ ID NOs: 79 and 506), or a modified or unmodified variant thereof.

[1847] A RNAi agent comprising a first and a second strand, wherein the sequences of the first and/or second strands comprise the sequences of a first and/or second strand of: AD-35587.4 (SEQ ID NOs: 80 and 507), or a modified or unmodified variant thereof.

[1848] A RNAi agent comprising a first and a second strand, wherein the sequences of the first and/or second strands comprise the sequences of a first and/or second strand of: AD-35593.4 (SEQ ID NOs: 81 and 508), or a modified or unmodified variant thereof.

[1849] A RNAi agent comprising a first and a second strand, wherein the sequences of the first and/or second strands comprise the sequences of a first and/or second strand of: AD-35599.4 (SEQ ID NOs: 82 and 509), or a modified or unmodified variant thereof.

[1850] A RNAi agent comprising a first and a second strand, wherein the sequences of the first and/or second strands comprise the sequences of a first and/or second strand of: AD-35605.4 (SEQ ID NOs: 83 and 510), or a modified or unmodified variant thereof.

[1851] A RNAi agent comprising a first and a second strand, wherein the sequences of the first and/or second strands comprise the sequences of a first and/or second strand of: AD-35611.4 (SEQ ID NOs: 84 and 511), or a modified or unmodified variant thereof.

[1852] A RNAi agent comprising a first and a second strand, wherein the sequences of the first and/or second strands comprise the sequences of a first and/or second strand of: AD-35617.4 (SEQ ID NOs: 85 and 512), or a modified or unmodified variant thereof.

[1853] A RNAi agent comprising a first and a second strand, wherein the sequences of the first and/or second strands comprise the sequences of a first and/or second strand of: AD-35576.4 (SEQ ID NOs: 86 and 513), or a modified or unmodified variant thereof.

[1854] A RNAi agent comprising a first and a second strand, wherein the sequences of the first and/or second strands comprise the sequences of a first and/or second strand of: AD-35588.4 (SEQ ID NOs: 87 and 514), or a modified or unmodified variant thereof.

[1855] A RNAi agent comprising a first and a second strand, wherein the sequences of the first and/or second strands comprise the sequences of a first and/or second strand of: AD-35667.1 (SEQ ID NOs: 88 and 515), or a modified or unmodified variant thereof.

[1856] A RNAi agent comprising a first and a second strand, wherein the sequences of the first and/or second strands comprise the sequences of a first and/or second strand of: AD-35673.1 (SEQ ID NOs: 89 and 516), or a modified or unmodified variant thereof.

[1857] A RNAi agent comprising a first and a second strand, wherein the sequences of the first and/or second strands comprise the sequences of a first and/or second strand of: AD-35679.1 (SEQ ID NOs: 90 and 517), or a modified or unmodified variant thereof.

[1858] A RNAi agent comprising a first and a second strand, wherein the sequences of the first and/or second strands comprise the sequences of a first and/or second strand of: AD-35685.1 (SEQ ID NOs: 91 and 518), or a modified or unmodified variant thereof.

[1859] A RNAi agent comprising a first and a second strand, wherein the sequences of the first and/or second strands comprise the sequences of a first and/or second strand of: AD-35691.1 (SEQ ID NOs: 92 and 519), or a modified or unmodified variant thereof.

[1860] A RNAi agent comprising a first and a second strand, wherein the sequences of the first and/or second strands comprise the sequences of a first and/or second strand of: AD-35557.1 (SEQ ID NOs: 93 and 520), or a modified or unmodified variant thereof.

[1861] A RNAi agent comprising a first and a second strand, wherein the sequences of the first and/or second strands comprise the sequences of a first and/or second strand of: AD-35618.1 (SEQ ID NOs: 94 and 521), or a modified or unmodified variant thereof.

[1862] A RNAi agent comprising a first and a second strand, wherein the sequences of the first and/or second strands comprise the sequences of a first and/or second strand of: AD-35569.1 (SEQ ID NOs: 95 and 522), or a modified or unmodified variant thereof.

[1863] A RNAi agent comprising a first and a second strand, wherein the sequences of the first and/or second strands comprise the sequences of a first and/or second strand of: AD-35534.1 (SEQ ID NOs: 96 and 523), or a modified or unmodified variant thereof.

[1864] A RNAi agent comprising a first and a second strand, wherein the sequences of the first and/or second strands comprise the sequences of a first and/or second strand of: AD-35582.1 (SEQ ID NOs: 97 and 524), or a modified or unmodified variant thereof.

[1865] A RNAi agent comprising a first and a second strand, wherein the sequences of the first and/or second strands comprise the sequences of a first and/or second strand of: AD-35594.1 (SEQ ID NOs: 98 and 525), or a modified or unmodified variant thereof.

[1866] A RNAi agent comprising a first and a second strand, wherein the sequences of the first and/or second strands comprise the sequences of a first and/or second strand of: AD-35600.1 (SEQ ID NOs: 99 and 526), or a modified or unmodified variant thereof.

[1867] A RNAi agent comprising a first and a second strand, wherein the sequences of the first and/or second strands comprise the sequences of a first and/or second strand of: AD-35606.1 (SEQ ID NOs: 100 and 527), or a modified or unmodified variant thereof.

[1868] A RNAi agent comprising a first and a second strand, wherein the sequences of the first and/or second strands comprise the sequences of a first and/or second strand of: AD-35612.1 (SEQ ID NOs: 101 and 528), or a modified or unmodified variant thereof.

[1869] A RNAi agent comprising a first and a second strand, wherein the sequences of the first and/or second strands comprise the sequences of a first and/or second strand of: AD-38127.1 (SEQ ID NOs: 102 and 529), or a modified or unmodified variant thereof.

[1870] A RNAi agent comprising a first and a second strand, wherein the sequences of the first and/or second strands comprise the sequences of a first and/or second strand of: AD-38133.1 (SEQ ID NOs: 103 and 530), or a modified or unmodified variant thereof.

[1871] A RNAi agent comprising a first and a second strand, wherein the sequences of the first and/or second strands comprise the sequences of a first and/or second strand of: AD-38139.1 (SEQ ID NOs: 104 and 531), or a modified or unmodified variant thereof.

[1872] A RNAi agent comprising a first and a second strand, wherein the sequences of the first and/or second strands comprise the sequences of a first and/or second strand of: AD-38145.1 (SEQ ID NOs: 105 and 532), or a modified or unmodified variant thereof.

[1873] A RNAi agent comprising a first and a second strand, wherein the sequences of the first and/or second strands comprise the sequences of a first and/or second strand of: AD-38151.1 (SEQ ID NOs: 106 and 533), or a modified or unmodified variant thereof.

[1874] A RNAi agent comprising a first and a second strand, wherein the sequences of the first and/or second strands comprise the sequences of a first and/or second strand of: AD-38157.1 (SEQ ID NOs: 107 and 534), or a modified or unmodified variant thereof.

[1875] A RNAi agent comprising a first and a second strand, wherein the sequences of the first and/or second strands comprise the sequences of a first and/or second strand of: AD-38163.1 (SEQ ID NOs: 108 and 535), or a modified or unmodified variant thereof.

[1876] A RNAi agent comprising a first and a second strand, wherein the sequences of the first and/or second strands comprise the sequences of a first and/or second strand of: AD-38169.1 (SEQ ID NOs: 109 and 536), or a modified or unmodified variant thereof.

[1877] A RNAi agent comprising a first and a second strand, wherein the sequences of the first and/or second strands comprise the sequences of a first and/or second strand of: AD-38128.1 (SEQ ID NOs: 110 and 537), or a modified or unmodified variant thereof.

[1878] A RNAi agent comprising a first and a second strand, wherein the sequences of the first and/or second strands comprise the sequences of a first and/or second strand of: AD-38134.1 (SEQ ID NOs: 111 and 538), or a modified or unmodified variant thereof.

[1879] A RNAi agent comprising a first and a second strand, wherein the sequences of the first and/or second strands comprise the sequences of a first and/or second strand of: AD-38140.1 (SEQ ID NOs: 112 and 539), or a modified or unmodified variant thereof.

[1880] A RNAi agent comprising a first and a second strand, wherein the sequences of the first and/or second strands comprise the sequences of a first and/or second strand of: AD-38146.1 (SEQ ID NOs: 113 and 540), or a modified or unmodified variant thereof.

[1881] A RNAi agent comprising a first and a second strand, wherein the sequences of the first and/or second strands comprise the sequences of a first and/or second strand of: AD-38152.1 (SEQ ID NOs: 114 and 541), or a modified or unmodified variant thereof.

[1882] A RNAi agent comprising a first and a second strand, wherein the sequences of the first and/or second strands comprise the sequences of a first and/or second strand of: AD-38158.1 (SEQ ID NOs: 115 and 542), or a modified or unmodified variant thereof.

[1883] A RNAi agent comprising a first and a second strand, wherein the sequences of the first and/or second strands comprise the sequences of a first and/or second strand of: AD-38164.1 (SEQ ID NOs: 116 and 543), or a modified or unmodified variant thereof.

[1884] A RNAi agent comprising a first and a second strand, wherein the sequences of the first and/or second strands comprise the sequences of a first and/or second strand of: AD-38170.1 (SEQ ID NOs: 117 and 544), or a modified or unmodified variant thereof.

[1885] A RNAi agent comprising a first and a second strand, wherein the sequences of the first and/or second strands comprise the sequences of a first and/or second strand of: AD-38129.1 (SEQ ID NOs: 118 and 545), or a modified or unmodified variant thereof.

[1886] A RNAi agent comprising a first and a second strand, wherein the sequences of the first and/or second strands comprise the sequences of a first and/or second strand of: AD-38135.1 (SEQ ID NOs: 119 and 546), or a modified or unmodified variant thereof.

[1887] A RNAi agent comprising a first and a second strand, wherein the sequences of the first and/or second strands comprise the sequences of a first and/or second strand of: AD-38141.1 (SEQ ID NOs: 120 and 547), or a modified or unmodified variant thereof.

[1888] A RNAi agent comprising a first and a second strand, wherein the sequences of the first and/or second strands comprise the sequences of a first and/or second strand of: AD-38147.1 (SEQ ID NOs: 121 and 548), or a modified or unmodified variant thereof.

[1889] A RNAi agent comprising a first and a second strand, wherein the sequences of the first and/or second strands comprise the sequences of a first and/or second strand of: AD-38153.1 (SEQ ID NOs: 122 and 549), or a modified or unmodified variant thereof.

[1890] A RNAi agent comprising a first and a second strand, wherein the sequences of the first and/or second strands comprise the sequences of a first and/or second strand of: AD-38159.1 (SEQ ID NOs: 123 and 550), or a modified or unmodified variant thereof.

[1891] A RNAi agent comprising a first and a second strand, wherein the sequences of the first and/or second strands comprise the sequences of a first and/or second strand of: AD-38165.1 (SEQ ID NOs: 124 and 551), or a modified or unmodified variant thereof.

[1892] A RNAi agent comprising a first and a second strand, wherein the sequences of the first and/or second strands comprise the sequences of a first and/or second strand of: AD-38171.1 (SEQ ID NOs: 125 and 552), or a modified or unmodified variant thereof.

[1893] A RNAi agent comprising a first and a second strand, wherein the sequences of the first and/or second strands comprise the sequences of a first and/or second strand of: AD-38130.1 (SEQ ID NOs: 126 and 553), or a modified or unmodified variant thereof.

[1894] A RNAi agent comprising a first and a second strand, wherein the sequences of the first and/or second strands comprise the sequences of a first and/or second strand of: AD-38136.1 (SEQ ID NOs: 127 and 554), or a modified or unmodified variant thereof.

[1895] A RNAi agent comprising a first and a second strand, wherein the sequences of the first and/or second strands comprise the sequences of a first and/or second strand of: AD-38142.1 (SEQ ID NOs: 128 and 555), or a modified or unmodified variant thereof.

[1896] A RNAi agent comprising a first and a second strand, wherein the sequences of the first and/or second strands comprise the sequences of a first and/or second strand of: AD-38148.1 (SEQ ID NOs: 129 and 556), or a modified or unmodified variant thereof.

[1897] A RNAi agent comprising a first and a second strand, wherein the sequences of the first and/or second strands comprise the sequences of a first and/or second strand of: AD-38154.1 (SEQ ID NOs: 130 and 557), or a modified or unmodified variant thereof.

[1898] A RNAi agent comprising a first and a second strand, wherein the sequences of the first and/or second strands comprise the sequences of a first and/or second strand of: AD-38160.1 (SEQ ID NOs: 131 and 558), or a modified or unmodified variant thereof.

[1899] A RNAi agent comprising a first and a second strand, wherein the sequences of the first and/or second strands comprise the sequences of a first and/or second strand of: AD-38166.1 (SEQ ID NOs: 132 and 559), or a modified or unmodified variant thereof.

[1900] A RNAi agent comprising a first and a second strand, wherein the sequences of the first and/or second strands comprise the sequences of a first and/or second strand of: AD-38172.1 (SEQ ID NOs: 133 and 560), or a modified or unmodified variant thereof.

[1901] A RNAi agent comprising a first and a second strand, wherein the sequences of the first and/or second strands comprise the sequences of a first and/or second strand of: AD-38131.1 (SEQ ID NOs: 134 and 561), or a modified or unmodified variant thereof.

[1902] A RNAi agent comprising a first and a second strand, wherein the sequences of the first and/or second strands comprise the sequences of a first and/or second strand of: AD-38137.1 (SEQ ID NOs: 135 and 562), or a modified or unmodified variant thereof.

[1903] A RNAi agent comprising a first and a second strand, wherein the sequences of the first and/or second strands comprise the sequences of a first and/or second strand of: AD-38143.1 (SEQ ID NOs: 136 and 563), or a modified or unmodified variant thereof.

[1904] A RNAi agent comprising a first and a second strand, wherein the sequences of the first and/or second strands comprise the sequences of a first and/or second strand of: AD-38149.1 (SEQ ID NOs: 137 and 564), or a modified or unmodified variant thereof.

[1905] A RNAi agent comprising a first and a second strand, wherein the sequences of the first and/or second strands comprise the sequences of a first and/or second strand of: AD-38155.1 (SEQ ID NOs: 138 and 565), or a modified or unmodified variant thereof.

[1906] A RNAi agent comprising a first and a second strand, wherein the sequences of the first and/or second strands comprise the sequences of a first and/or second strand of: AD-38161.1 (SEQ ID NOs: 139 and 566), or a modified or unmodified variant thereof.

[1907] A RNAi agent comprising a first and a second strand, wherein the sequences of the first and/or second strands comprise the sequences of a first and/or second strand of: AD-38167.1 (SEQ ID NOs: 140 and 567), or a modified or unmodified variant thereof.

[1908] A RNAi agent comprising a first and a second strand, wherein the sequences of the first and/or second strands comprise the sequences of a first and/or second strand of: AD-38173.1 (SEQ ID NOs: 141 and 568), or a modified or unmodified variant thereof.

[1909] A RNAi agent comprising a first and a second strand, wherein the sequences of the first and/or second strands comprise the sequences of a first and/or second strand of: AD-38132.1 (SEQ ID NOs: 142 and 569), or a modified or unmodified variant thereof.

[1910] A RNAi agent comprising a first and a second strand, wherein the sequences of the first and/or second strands comprise the sequences of a first and/or second strand of: AD-38138.1 (SEQ ID NOs: 143 and 570), or a modified or unmodified variant thereof.

[1911] A RNAi agent comprising a first and a second strand, wherein the sequences of the first and/or second strands comprise the sequences of a first and/or second strand of: AD-38144.1 (SEQ ID NOs: 144 and 571), or a modified or unmodified variant thereof.

[1912] A RNAi agent comprising a first and a second strand, wherein the sequences of the first and/or second strands comprise the sequences of a first and/or second strand of: AD-38150.1 (SEQ ID NOs: 145 and 572), or a modified or unmodified variant thereof.

[1913] A RNAi agent comprising a first and a second strand, wherein the sequences of the first and/or second strands comprise the sequences of a first and/or second strand of: AD-38156.1 (SEQ ID NOs: 146 and 573), or a modified or unmodified variant thereof.

[1914] A RNAi agent comprising a first and a second strand, wherein the sequences of the first and/or second strands comprise the sequences of a first and/or second strand of: AD-38162.1 (SEQ ID NOs: 147 and 574), or a modified or unmodified variant thereof.

[1915] A RNAi agent comprising a first and a second strand, wherein the sequences of the first and/or second strands comprise the sequences of a first and/or second strand of: AD-38168.1 (SEQ ID NOs: 148 and 575), or a modified or unmodified variant thereof.

[1916] A RNAi agent comprising a first and a second strand, wherein the sequences of the first and/or second strands comprise the sequences of a first and/or second strand of: AD-38174.1 (SEQ ID NOs: 149 and 576), or a modified or unmodified variant thereof.

[1917] A RNAi agent comprising a first and a second strand, wherein the sequences of the first and/or second strands comprise the sequences of a first and/or second strand of: AD-39683.1 (SEQ ID NOs: 150 and 577), or a modified or unmodified variant thereof.

[1918] A RNAi agent comprising a first and a second strand, wherein the sequences of the first and/or second strands comprise the sequences of a first and/or second strand of: AD-39689.1 (SEQ ID NOs: 151 and 578), or a modified or unmodified variant thereof.

[1919] A RNAi agent comprising a first and a second strand, wherein the sequences of the first and/or second strands comprise the sequences of a first and/or second strand of: AD-39695.1 (SEQ ID NOs: 152 and 579), or a modified or unmodified variant thereof.

[1920] A RNAi agent comprising a first and a second strand, wherein the sequences of the first and/or second strands comprise the sequences of a first and/or second strand of: AD-39701.1 (SEQ ID NOs: 153 and 580), or a modified or unmodified variant thereof.

[1921] A RNAi agent comprising a first and a second strand, wherein the sequences of the first and/or second strands comprise the sequences of a first and/or second strand of: AD-39707.1 (SEQ ID NOs: 154 and 581), or a modified or unmodified variant thereof.

[1922] A RNAi agent comprising a first and a second strand, wherein the sequences of the first and/or second strands comprise the sequences of a first and/or second strand of: AD-39713.1 (SEQ ID NOs: 155 and 582), or a modified or unmodified variant thereof.

[1923] A RNAi agent comprising a first and a second strand, wherein the sequences of the first and/or second strands comprise the sequences of a first and/or second strand of: AD-39719.1 (SEQ ID NOs: 156 and 583), or a modified or unmodified variant thereof.

[1924] A RNAi agent comprising a first and a second strand, wherein the sequences of the first and/or second strands comprise the sequences of a first and/or second strand of: AD-39725.1 (SEQ ID NOs: 157 and 584), or a modified or unmodified variant thereof.

[1925] A RNAi agent comprising a first and a second strand, wherein the sequences of the first and/or second strands comprise the sequences of a first and/or second strand of: AD-39684.1 (SEQ ID NOs: 158 and 585), or a modified or unmodified variant thereof.

[1926] A RNAi agent comprising a first and a second strand, wherein the sequences of the first and/or second strands comprise the sequences of a first and/or second strand of: AD-39690.1 (SEQ ID NOs: 159 and 586), or a modified or unmodified variant thereof.

[1927] A RNAi agent comprising a first and a second strand, wherein the sequences of the first and/or second strands comprise the sequences of a first and/or second strand of: AD-39696.1 (SEQ ID NOs: 160 and 587), or a modified or unmodified variant thereof.

[1928] A RNAi agent comprising a first and a second strand, wherein the sequences of the first and/or second strands comprise the sequences of a first and/or second strand of: AD-39702.1 (SEQ ID NOs: 161 and 588), or a modified or unmodified variant thereof.

[1929] A RNAi agent comprising a first and a second strand, wherein the sequences of the first and/or second strands comprise the sequences of a first and/or second strand of: AD-39708.1 (SEQ ID NOs: 162 and 589), or a modified or unmodified variant thereof.

[1930] A RNAi agent comprising a first and a second strand, wherein the sequences of the first and/or second strands comprise the sequences of a first and/or second strand of: AD-39714.1 (SEQ ID NOs: 163 and 590), or a modified or unmodified variant thereof.

[1931] A RNAi agent comprising a first and a second strand, wherein the sequences of the first and/or second strands comprise the sequences of a first and/or second strand of: AD-39720.1 (SEQ ID NOs: 164 and 591), or a modified or unmodified variant thereof.

[1932] A RNAi agent comprising a first and a second strand, wherein the sequences of the first and/or second strands comprise the sequences of a first and/or second strand of: AD-39726.1 (SEQ ID NOs: 165 and 592), or a modified or unmodified variant thereof.

[1933] A RNAi agent comprising a first and a second strand, wherein the sequences of the first and/or second strands comprise the sequences of a first and/or second strand of: AD-39685.1 (SEQ ID NOs: 166 and 593), or a modified or unmodified variant thereof.

[1934] A RNAi agent comprising a first and a second strand, wherein the sequences of the first and/or second strands comprise the sequences of a first and/or second strand of: AD-39691.1 (SEQ ID NOs: 167 and 594), or a modified or unmodified variant thereof.

[1935] A RNAi agent comprising a first and a second strand, wherein the sequences of the first and/or second strands comprise the sequences of a first and/or second strand of: AD-39697.1 (SEQ ID NOs: 168 and 595), or a modified or unmodified variant thereof.

[1936] A RNAi agent comprising a first and a second strand, wherein the sequences of the first and/or second strands comprise the sequences of a first and/or second strand of: AD-39703.1 (SEQ ID NOs: 169 and 596), or a modified or unmodified variant thereof.

[1937] A RNAi agent comprising a first and a second strand, wherein the sequences of the first and/or second strands comprise the sequences of a first and/or second strand of: AD-39709.1 (SEQ ID NOs: 170 and 597), or a modified or unmodified variant thereof.

[1938] A RNAi agent comprising a first and a second strand, wherein the sequences of the first and/or second strands comprise the sequences of a first and/or second strand of: AD-39715.1 (SEQ ID NOs: 171 and 598), or a modified or unmodified variant thereof.

[1939] A RNAi agent comprising a first and a second strand, wherein the sequences of the first and/or second strands comprise the sequences of a first and/or second strand of: AD-39721.1 (SEQ ID NOs: 172 and 599), or a modified or unmodified variant thereof.

[1940] A RNAi agent comprising a first and a second strand, wherein the sequences of the first and/or second strands comprise the sequences of a first and/or second strand of: AD-39727.1 (SEQ ID NOs: 173 and 600), or a modified or unmodified variant thereof.

[1941] A RNAi agent comprising a first and a second strand, wherein the sequences of the first and/or second strands comprise the sequences of a first and/or second strand of: AD-39686.1 (SEQ ID NOs: 174 and 601), or a modified or unmodified variant thereof.

[1942] A RNAi agent comprising a first and a second strand, wherein the sequences of the first and/or second strands comprise the sequences of a first and/or second strand of: AD-39692.1 (SEQ ID NOs: 175 and 602), or a modified or unmodified variant thereof.

[1943] A RNAi agent comprising a first and a second strand, wherein the sequences of the first and/or second strands comprise the sequences of a first and/or second strand of: AD-39698.1 (SEQ ID NOs: 176 and 603), or a modified or unmodified variant thereof.

[1944] A RNAi agent comprising a first and a second strand, wherein the sequences of the first and/or second strands comprise the sequences of a first and/or second strand of: AD-39704.1 (SEQ ID NOs: 177 and 604), or a modified or unmodified variant thereof.

[1945] A RNAi agent comprising a first and a second strand, wherein the sequences of the first and/or second strands comprise the sequences of a first and/or second strand of: AD-39710.1 (SEQ ID NOs: 178 and 605), or a modified or unmodified variant thereof.

[1946] A RNAi agent comprising a first and a second strand, wherein the sequences of the first and/or second strands comprise the sequences of a first and/or second strand of: AD-39716.1 (SEQ ID NOs: 179 and 606), or a modified or unmodified variant thereof.

[1947] A RNAi agent comprising a first and a second strand, wherein the sequences of the first and/or second strands comprise the sequences of a first and/or second strand of: AD-39722.1 (SEQ ID NOs: 180 and 607), or a modified or unmodified variant thereof.

[1948] A RNAi agent comprising a first and a second strand, wherein the sequences of the first and/or second strands comprise the sequences of a first and/or second strand of: AD-39728.1 (SEQ ID NOs: 181 and 608), or a modified or unmodified variant thereof.

[1949] A RNAi agent comprising a first and a second strand, wherein the sequences of the first and/or second strands comprise the sequences of a first and/or second strand of: AD-39687.1 (SEQ ID NOs: 182 and 609), or a modified or unmodified variant thereof.

[1950] A RNAi agent comprising a first and a second strand, wherein the sequences of the first and/or second strands comprise the sequences of a first and/or second strand of: AD-39693.1 (SEQ ID NOs: 183 and 610), or a modified or unmodified variant thereof.

[1951] A RNAi agent comprising a first and a second strand, wherein the sequences of the first and/or second strands comprise the sequences of a first and/or second strand of: AD-39699.1 (SEQ ID NOs: 184 and 611), or a modified or unmodified variant thereof.

[1952] A RNAi agent comprising a first and a second strand, wherein the sequences of the first and/or second strands comprise the sequences of a first and/or second strand of: AD-39705.1 (SEQ ID NOs: 185 and 612), or a modified or unmodified variant thereof.

[1953] A RNAi agent comprising a first and a second strand, wherein the sequences of the first and/or second strands comprise the sequences of a first and/or second strand of: AD-39711.1 (SEQ ID NOs: 186 and 613), or a modified or unmodified variant thereof.

[1954] A RNAi agent comprising a first and a second strand, wherein the sequences of the first and/or second strands comprise the sequences of a first and/or second strand of: AD-39717.1 (SEQ ID NOs: 187 and 614), or a modified or unmodified variant thereof.

[1955] A RNAi agent comprising a first and a second strand, wherein the sequences of the first and/or second strands comprise the sequences of a first and/or second strand of: AD-39723.1 (SEQ ID NOs: 188 and 615), or a modified or unmodified variant thereof.

[1956] A RNAi agent comprising a first and a second strand, wherein the sequences of the first and/or second strands comprise the sequences of a first and/or second strand of: AD-39729.1 (SEQ ID NOs: 189 and 616), or a modified or unmodified variant thereof.

[1957] A RNAi agent comprising a first and a second strand, wherein the sequences of the first and/or second strands comprise the sequences of a first and/or second strand of: AD-39688.1 (SEQ ID NOs: 190 and 617), or a modified or unmodified variant thereof.

[1958] A RNAi agent comprising a first and a second strand, wherein the sequences of the first and/or second strands comprise the sequences of a first and/or second strand of: AD-39694.1 (SEQ ID NOs: 191 and 618), or a modified or unmodified variant thereof.

[1959] A RNAi agent comprising a first and a second strand, wherein the sequences of the first and/or second strands comprise the sequences of a first and/or second strand of: AD-39700.1 (SEQ ID NOs: 192 and 619), or a modified or unmodified variant thereof.

[1960] A RNAi agent comprising a first and a second strand, wherein the sequences of the first and/or second strands comprise the sequences of a first and/or second strand of: AD-39706.1 (SEQ ID NOs: 193 and 620), or a modified or unmodified variant thereof.

[1961] A RNAi agent comprising a first and a second strand, wherein the sequences of the first and/or second strands comprise the sequences of a first and/or second strand of: AD-39712.1 (SEQ ID NOs: 194 and 621), or a modified or unmodified variant thereof.

[1962] A RNAi agent comprising a first and a second strand, wherein the sequences of the first and/or second strands comprise the sequences of a first and/or second strand of: AD-39718.1 (SEQ ID NOs: 195 and 622), or a modified or unmodified variant thereof.

[1963] A RNAi agent comprising a first and a second strand, wherein the sequences of the first and/or second strands comprise the sequences of a first and/or second strand of: AD-39724.1 (SEQ ID NOs: 196 and 623), or a modified or unmodified variant thereof.

[1964] A RNAi agent comprising a first and a second strand, wherein the sequences of the first and/or second strands comprise the sequences of a first and/or second strand of: AD-39730.1 (SEQ ID NOs: 197 and 624), or a modified or unmodified variant thereof.

[1965] A RNAi agent comprising a first and a second strand, wherein the sequences of the first and/or second strands comprise the sequences of a first and/or second strand of: AD-39736.1 (SEQ ID NOs: 198 and 625), or a modified or unmodified variant thereof.

[1966] A RNAi agent comprising a first and a second strand, wherein the sequences of the first and/or second strands comprise the sequences of a first and/or second strand of: AD-39742.1 (SEQ ID NOs: 199 and 626), or a modified or unmodified variant thereof.

[1967] A RNAi agent comprising a first and a second strand, wherein the sequences of the first and/or second strands comprise the sequences of a first and/or second strand of: AD-39748.1 (SEQ ID NOs: 200 and 627), or a modified or unmodified variant thereof.

[1968] A RNAi agent comprising a first and a second strand, wherein the sequences of the first and/or second strands comprise the sequences of a first and/or second strand of: AD-39754.1 (SEQ ID NOs: 201 and 628), or a modified or unmodified variant thereof.

[1969] A RNAi agent comprising a first and a second strand, wherein the sequences of the first and/or second strands comprise the sequences of a first and/or second strand of: AD-39760.1 (SEQ ID NOs: 202 and 629), or a modified or unmodified variant thereof.

[1970] A RNAi agent comprising a first and a second strand, wherein the sequences of the first and/or second strands comprise the sequences of a first and/or second strand of: AD-39766.1 (SEQ ID NOs: 203 and 630), or a modified or unmodified variant thereof.

[1971] A RNAi agent comprising a first and a second strand, wherein the sequences of the first and/or second strands comprise the sequences of a first and/or second strand of: AD-39772.1 (SEQ ID NOs: 204 and 631), or a modified or unmodified variant thereof.

[1972] A RNAi agent comprising a first and a second strand, wherein the sequences of the first and/or second strands comprise the sequences of a first and/or second strand of: AD-39731.1 (SEQ ID NOs: 205 and 632), or a modified or unmodified variant thereof.

[1973] A RNAi agent comprising a first and a second strand, wherein the sequences of the first and/or second strands comprise the sequences of a first and/or second strand of: AD-39737.1 (SEQ ID NOs: 206 and 633), or a modified or unmodified variant thereof.

[1974] A RNAi agent comprising a first and a second strand, wherein the sequences of the first and/or second strands comprise the sequences of a first and/or second strand of: AD-39743.1 (SEQ ID NOs: 207 and 634), or a modified or unmodified variant thereof.

[1975] A RNAi agent comprising a first and a second strand, wherein the sequences of the first and/or second strands comprise the sequences of a first and/or second strand of: AD-39749.1 (SEQ ID NOs: 208 and 635), or a modified or unmodified variant thereof.

[1976] A RNAi agent comprising a first and a second strand, wherein the sequences of the first and/or second strands comprise the sequences of a first and/or second strand of: AD-39755.1 (SEQ ID NOs: 209 and 636), or a modified or unmodified variant thereof.

[1977] A RNAi agent comprising a first and a second strand, wherein the sequences of the first and/or second strands comprise the sequences of a first and/or second strand of: AD-39761.1 (SEQ ID NOs: 210 and 637), or a modified or unmodified variant thereof.

[1978] A RNAi agent comprising a first and a second strand, wherein the sequences of the first and/or second strands comprise the sequences of a first and/or second strand of: AD-39767.1 (SEQ ID NOs: 211 and 638), or a modified or unmodified variant thereof.

[1979] A RNAi agent comprising a first and a second strand, wherein the sequences of the first and/or second strands comprise the sequences of a first and/or second strand of: AD-39773.1 (SEQ ID NOs: 212 and 639), or a modified or unmodified variant thereof.

[1980] A RNAi agent comprising a first and a second strand, wherein the sequences of the first and/or second strands comprise the sequences of a first and/or second strand of: AD-39732.1 (SEQ ID NOs: 213 and 640), or a modified or unmodified variant thereof.

[1981] A RNAi agent comprising a first and a second strand, wherein the sequences of the first and/or second strands comprise the sequences of a first and/or second strand of: AD-39738.1 (SEQ ID NOs: 214 and 641), or a modified or unmodified variant thereof.

[1982] A RNAi agent comprising a first and a second strand, wherein the sequences of the first and/or second strands comprise the sequences of a first and/or second strand of: AD-39744.1 (SEQ ID NOs: 215 and 642), or a modified or unmodified variant thereof.

[1983] A RNAi agent comprising a first and a second strand, wherein the sequences of the first and/or second strands comprise the sequences of a first and/or second strand of: AD-39750.1 (SEQ ID NOs: 216 and 643), or a modified or unmodified variant thereof.

[1984] A RNAi agent comprising a first and a second strand, wherein the sequences of the first and/or second strands comprise the sequences of a first and/or second strand of: AD-39756.1 (SEQ ID NOs: 217 and 644), or a modified or unmodified variant thereof.

[1985] A RNAi agent comprising a first and a second strand, wherein the sequences of the first and/or second strands comprise the sequences of a first and/or second strand of: AD-39762.1 (SEQ ID NOs: 218 and 645), or a modified or unmodified variant thereof.

[1986] A RNAi agent comprising a first and a second strand, wherein the sequences of the first and/or second strands comprise the sequences of a first and/or second strand of: AD-39768.1 (SEQ ID NOs: 219 and 646), or a modified or unmodified variant thereof.

[1987] A RNAi agent comprising a first and a second strand, wherein the sequences of the first and/or second strands comprise the sequences of a first and/or second strand of: AD-39774.1 (SEQ ID NOs: 220 and 647), or a modified or unmodified variant thereof.

[1988] A RNAi agent comprising a first and a second strand, wherein the sequences of the first and/or second strands comprise the sequences of a first and/or second strand of: AD-39733.1 (SEQ ID NOs: 221 and 648), or a modified or unmodified variant thereof.

[1989] A RNAi agent comprising a first and a second strand, wherein the sequences of the first and/or second strands comprise the sequences of a first and/or second strand of: AD-39739.1 (SEQ ID NOs: 222 and 649), or a modified or unmodified variant thereof.

[1990] A RNAi agent comprising a first and a second strand, wherein the sequences of the first and/or second strands comprise the sequences of a first and/or second strand of: AD-39745.1 (SEQ ID NOs: 223 and 650), or a modified or unmodified variant thereof.

[1991] A RNAi agent comprising a first and a second strand, wherein the sequences of the first and/or second strands comprise the sequences of a first and/or second strand of: AD-39751.1 (SEQ ID NOs: 224 and 651), or a modified or unmodified variant thereof.

[1992] A RNAi agent comprising a first and a second strand, wherein the sequences of the first and/or second strands comprise the sequences of a first and/or second strand of: AD-39757.1 (SEQ ID NOs: 225 and 652), or a modified or unmodified variant thereof.

[1993] A RNAi agent comprising a first and a second strand, wherein the sequences of the first and/or second strands comprise the sequences of a first and/or second strand of: AD-39763.1 (SEQ ID NOs: 226 and 653), or a modified or unmodified variant thereof.

[1994] A RNAi agent comprising a first and a second strand, wherein the sequences of the first and/or second strands comprise the sequences of a first and/or second strand of: AD-39769.1 (SEQ ID NOs: 227 and 654), or a modified or unmodified variant thereof.

[1995] A RNAi agent comprising a first and a second strand, wherein the sequences of the first and/or second strands comprise the sequences of a first and/or second strand of: AD-39775.1 (SEQ ID NOs: 228 and 655), or a modified or unmodified variant thereof.

[1996] A RNAi agent comprising a first and a second strand, wherein the sequences of the first and/or second strands comprise the sequences of a first and/or second strand of: AD-39734.1 (SEQ ID NOs: 229 and 656), or a modified or unmodified variant thereof.

[1997] A RNAi agent comprising a first and a second strand, wherein the sequences of the first and/or second strands comprise the sequences of a first and/or second strand of: AD-39740.1 (SEQ ID NOs: 230 and 657), or a modified or unmodified variant thereof.

[1998] A RNAi agent comprising a first and a second strand, wherein the sequences of the first and/or second strands comprise the sequences of a first and/or second strand of: AD-39746.1 (SEQ ID NOs: 231 and 658), or a modified or unmodified variant thereof.

[1999] A RNAi agent comprising a first and a second strand, wherein the sequences of the first and/or second strands comprise the sequences of a first and/or second strand of: AD-39752.1 (SEQ ID NOs: 232 and 659), or a modified or unmodified variant thereof.

[2000] A RNAi agent comprising a first and a second strand, wherein the sequences of the first and/or second strands comprise the sequences of a first and/or second strand of: AD-39758.1 (SEQ ID NOs: 233 and 660), or a modified or unmodified variant thereof.

[2001] A RNAi agent comprising a first and a second strand, wherein the sequences of the first and/or second strands comprise the sequences of a first and/or second strand of: AD-39764.1 (SEQ ID NOs: 234 and 661), or a modified or unmodified variant thereof.

[2002] A RNAi agent comprising a first and a second strand, wherein the sequences of the first and/or second strands comprise the sequences of a first and/or second strand of: AD-39770.1 (SEQ ID NOs: 235 and 662), or a modified or unmodified variant thereof.

[2003] A RNAi agent comprising a first and a second strand, wherein the sequences of the first and/or second strands comprise the sequences of a first and/or second strand of: AD-39776.1 (SEQ ID NOs: 236 and 663), or a modified or unmodified variant thereof.

[2004] A RNAi agent comprising a first and a second strand, wherein the sequences of the first and/or second strands comprise the sequences of a first and/or second strand of: AD-39735.1 (SEQ ID NOs: 237 and 664), or a modified or unmodified variant thereof.

[2005] A RNAi agent comprising a first and a second strand, wherein the sequences of the first and/or second strands comprise the sequences of a first and/or second strand of: AD-39741.1 (SEQ ID NOs: 238 and 665), or a modified or unmodified variant thereof.

[2006] A RNAi agent comprising a first and a second strand, wherein the sequences of the first and/or second strands comprise the sequences of a first and/or second strand of: AD-39747.1 (SEQ ID NOs: 239 and 666), or a modified or unmodified variant thereof.

[2007] A RNAi agent comprising a first and a second strand, wherein the sequences of the first and/or second strands comprise the sequences of a first and/or second strand of: AD-39753.1 (SEQ ID NOs: 240 and 667), or a modified or unmodified variant thereof.

[2008] A RNAi agent comprising a first and a second strand, wherein the sequences of the first and/or second strands comprise the sequences of a first and/or second strand of: AD-39759.1 (SEQ ID NOs: 241 and 668), or a modified or unmodified variant thereof.

[2009] A RNAi agent comprising a first and a second strand, wherein the sequences of the first and/or second strands comprise the sequences of a first and/or second strand of: AD-39765.1 (SEQ ID NOs: 242 and 669), or a modified or unmodified variant thereof.

[2010] A RNAi agent comprising a first and a second strand, wherein the sequences of the first and/or second strands comprise the sequences of a first and/or second strand of: AD-39771.1 (SEQ ID NOs: 243 and 670), or a modified or unmodified variant thereof.

[2011] A RNAi agent comprising a first and a second strand, wherein the sequences of the first and/or second strands comprise the sequences of a first and/or second strand of: AD-39778.1 (SEQ ID NOs: 244 and 671), or a modified or unmodified variant thereof.

[2012] A RNAi agent comprising a first and a second strand, wherein the sequences of the first and/or second strands comprise the sequences of a first and/or second strand of: AD-39784.1 (SEQ ID NOs: 245 and 672), or a modified or unmodified variant thereof.

[2013] A RNAi agent comprising a first and a second strand, wherein the sequences of the first and/or second strands comprise the sequences of a first and/or second strand of: AD-39790.1 (SEQ ID NOs: 246 and 673), or a modified or unmodified variant thereof.

[2014] A RNAi agent comprising a first and a second strand, wherein the sequences of the first and/or second strands comprise the sequences of a first and/or second strand of: AD-39796.1 (SEQ ID NOs: 247 and 674), or a modified or unmodified variant thereof.

[2015] A RNAi agent comprising a first and a second strand, wherein the sequences of the first and/or second strands comprise the sequences of a first and/or second strand of: AD-39802.1 (SEQ ID NOs: 248 and 675), or a modified or unmodified variant thereof.

[2016] A RNAi agent comprising a first and a second strand, wherein the sequences of the first and/or second strands comprise the sequences of a first and/or second strand of: AD-39808.1 (SEQ ID NOs: 249 and 676), or a modified or unmodified variant thereof.

[2017] A RNAi agent comprising a first and a second strand, wherein the sequences of the first and/or second strands comprise the sequences of a first and/or second strand of: AD-39814.1 (SEQ ID NOs: 250 and 677), or a modified or unmodified variant thereof.

[2018] A RNAi agent comprising a first and a second strand, wherein the sequences of the first and/or second strands comprise the sequences of a first and/or second strand of: AD-39820.1 (SEQ ID NOs: 251 and 678), or a modified or unmodified variant thereof.

[2019] A RNAi agent comprising a first and a second strand, wherein the sequences of the first and/or second strands comprise the sequences of a first and/or second strand of: AD-39779.1 (SEQ ID NOs: 252 and 679), or a modified or unmodified variant thereof.

[2020] A RNAi agent comprising a first and a second strand, wherein the sequences of the first and/or second strands comprise the sequences of a first and/or second strand of: AD-39785.1 (SEQ ID NOs: 253 and 680), or a modified or unmodified variant thereof.

[2021] A RNAi agent comprising a first and a second strand, wherein the sequences of the first and/or second strands comprise the sequences of a first and/or second strand of: AD-39791.1 (SEQ ID NOs: 254 and 681), or a modified or unmodified variant thereof.

[2022] A RNAi agent comprising a first and a second strand, wherein the sequences of the first and/or second strands comprise the sequences of a first and/or second strand of: AD-39797.1 (SEQ ID NOs: 255 and 682), or a modified or unmodified variant thereof.

[2023] A RNAi agent comprising a first and a second strand, wherein the sequences of the first and/or second strands comprise the sequences of a first and/or second strand of: AD-39803.1 (SEQ ID NOs: 256 and 683), or a modified or unmodified variant thereof.

[2024] A RNAi agent comprising a first and a second strand, wherein the sequences of the first and/or second strands comprise the sequences of a first and/or second strand of: AD-39809.1 (SEQ ID NOs: 257 and 684), or a modified or unmodified variant thereof.

[2025] A RNAi agent comprising a first and a second strand, wherein the sequences of the first and/or second strands comprise the sequences of a first and/or second strand of: AD-39815.1 (SEQ ID NOs: 258 and 685), or a modified or unmodified variant thereof.

[2026] A RNAi agent comprising a first and a second strand, wherein the sequences of the first and/or second strands comprise the sequences of a first and/or second strand of: AD-39821.1 (SEQ ID NOs: 259 and 686), or a modified or unmodified variant thereof.

[2027] A RNAi agent comprising a first and a second strand, wherein the sequences of the first and/or second strands comprise the sequences of a first and/or second strand of: AD-39780.1 (SEQ ID NOs: 260 and 687), or a modified or unmodified variant thereof.

[2028] A RNAi agent comprising a first and a second strand, wherein the sequences of the first and/or second strands comprise the sequences of a first and/or second strand of: AD-39786.1 (SEQ ID NOs: 261 and 688), or a modified or unmodified variant thereof.

[2029] A RNAi agent comprising a first and a second strand, wherein the sequences of the first and/or second strands comprise the sequences of a first and/or second strand of: AD-39792.1 (SEQ ID NOs: 262 and 689), or a modified or unmodified variant thereof.

[2030] A RNAi agent comprising a first and a second strand, wherein the sequences of the first and/or second strands comprise the sequences of a first and/or second strand of: AD-39798.1 (SEQ ID NOs: 263 and 690), or a modified or unmodified variant thereof.

[2031] A RNAi agent comprising a first and a second strand, wherein the sequences of the first and/or second strands comprise the sequences of a first and/or second strand of: AD-39804.1 (SEQ ID NOs: 264 and 691), or a modified or unmodified variant thereof.

[2032] A RNAi agent comprising a first and a second strand, wherein the sequences of the first and/or second strands comprise the sequences of a first and/or second strand of: AD-39810.1 (SEQ ID NOs: 265 and 692), or a modified or unmodified variant thereof.

[2033] A RNAi agent comprising a first and a second strand, wherein the sequences of the first and/or second strands comprise the sequences of a first and/or second strand of: AD-39816.1 (SEQ ID NOs: 266 and 693), or a modified or unmodified variant thereof.

[2034] A RNAi agent comprising a first and a second strand, wherein the sequences of the first and/or second strands comprise the sequences of a first and/or second strand of: AD-39822.1 (SEQ ID NOs: 267 and 694), or a modified or unmodified variant thereof.

[2035] A RNAi agent comprising a first and a second strand, wherein the sequences of the first and/or second strands comprise the sequences of a first and/or second strand of: AD-39781.1 (SEQ ID NOs: 268 and 695), or a modified or unmodified variant thereof.

[2036] A RNAi agent comprising a first and a second strand, wherein the sequences of the first and/or second strands comprise the sequences of a first and/or second strand of: AD-39787.1 (SEQ ID NOs: 269 and 696), or a modified or unmodified variant thereof.

[2037] A RNAi agent comprising a first and a second strand, wherein the sequences of the first and/or second strands comprise the sequences of a first and/or second strand of: AD-39793.1 (SEQ ID NOs: 270 and 697), or a modified or unmodified variant thereof.

[2038] A RNAi agent comprising a first and a second strand, wherein the sequences of the first and/or second strands comprise the sequences of a first and/or second strand of: AD-39799.1 (SEQ ID NOs: 271 and 698), or a modified or unmodified variant thereof.

[2039] A RNAi agent comprising a first and a second strand, wherein the sequences of the first and/or second strands comprise the sequences of a first and/or second strand of: AD-39805.1 (SEQ ID NOs: 272 and 699), or a modified or unmodified variant thereof.

[2040] A RNAi agent comprising a first and a second strand, wherein the sequences of the first and/or second strands comprise the sequences of a first and/or second strand of: AD-39811.1 (SEQ ID NOs: 273 and 700), or a modified or unmodified variant thereof.

[2041] A RNAi agent comprising a first and a second strand, wherein the sequences of the first and/or second strands comprise the sequences of a first and/or second strand of: AD-39817.1 (SEQ ID NOs: 274 and 701), or a modified or unmodified variant thereof.

[2042] A RNAi agent comprising a first and a second strand, wherein the sequences of the first and/or second strands comprise the sequences of a first and/or second strand of: AD-39823.1 (SEQ ID NOs: 275 and 702), or a modified or unmodified variant thereof.

[2043] A RNAi agent comprising a first and a second strand, wherein the sequences of the first and/or second strands comprise the sequences of a first and/or second strand of: AD-39782.1 (SEQ ID NOs: 276 and 703), or a modified or unmodified variant thereof.

[2044] A RNAi agent comprising a first and a second strand, wherein the sequences of the first and/or second strands comprise the sequences of a first and/or second strand of: AD-39788.1 (SEQ ID NOs: 277 and 704), or a modified or unmodified variant thereof.

[2045] A RNAi agent comprising a first and a second strand, wherein the sequences of the first and/or second strands comprise the sequences of a first and/or second strand of: AD-39794.1 (SEQ ID NOs: 278 and 705), or a modified or unmodified variant thereof.

[2046] A RNAi agent comprising a first and a second strand, wherein the sequences of the first and/or second strands comprise the sequences of a first and/or second strand of: AD-39800.1 (SEQ ID NOs: 279 and 706), or a modified or unmodified variant thereof.

[2047] A RNAi agent comprising a first and a second strand, wherein the sequences of the first and/or second strands comprise the sequences of a first and/or second strand of: AD-39806.1 (SEQ ID NOs: 280 and 707), or a modified or unmodified variant thereof.

[2048] A RNAi agent comprising a first and a second strand, wherein the sequences of the first and/or second strands comprise the sequences of a first and/or second strand of: AD-39812.1 (SEQ ID NOs: 281 and 708), or a modified or unmodified variant thereof.

[2049] A RNAi agent comprising a first and a second strand, wherein the sequences of the first and/or second strands comprise the sequences of a first and/or second strand of: AD-39818.1 (SEQ ID NOs: 282 and 709), or a modified or unmodified variant thereof.

[2050] A RNAi agent comprising a first and a second strand, wherein the sequences of the first and/or second strands comprise the sequences of a first and/or second strand of: AD-39824.1 (SEQ ID NOs: 283 and 710), or a modified or unmodified variant thereof.

[2051] A RNAi agent comprising a first and a second strand, wherein the sequences of the first and/or second strands comprise the sequences of a first and/or second strand of: AD-39783.1 (SEQ ID NOs: 284 and 711), or a modified or unmodified variant thereof.

[2052] A RNAi agent comprising a first and a second strand, wherein the sequences of the first and/or second strands comprise the sequences of a first and/or second strand of: AD-39789.1 (SEQ ID NOs: 285 and 712), or a modified or unmodified variant thereof.

[2053] A RNAi agent comprising a first and a second strand, wherein the sequences of the first and/or second strands comprise the sequences of a first and/or second strand of: AD-39795.1 (SEQ ID NOs: 286 and 713), or a modified or unmodified variant thereof.

[2054] A RNAi agent comprising a first and a second strand, wherein the sequences of the first and/or second strands comprise the sequences of a first and/or second strand of: AD-39801.1 (SEQ ID NOs: 287 and 714), or a modified or unmodified variant thereof.

[2055] A RNAi agent comprising a first and a second strand, wherein the sequences of the first and/or second strands comprise the sequences of a first and/or second strand of: AD-39807.1 (SEQ ID NOs: 288 and 715), or a modified or unmodified variant thereof.

[2056] A RNAi agent comprising a first and a second strand, wherein the sequences of the first and/or second strands comprise the sequences of a first and/or second strand of: AD-39813.1 (SEQ ID NOs: 289 and 716), or a modified or unmodified variant thereof.

[2057] A RNAi agent comprising a first and a second strand, wherein the sequences of the first and/or second strands comprise the sequences of a first and/or second strand of: AD-39819.1 (SEQ ID NOs: 290 and 717), or a modified or unmodified variant thereof.

[2058] A RNAi agent comprising a first and a second strand, wherein the sequences of the first and/or second strands comprise the sequences of a first and/or second strand of: AD-39825.1 (SEQ ID NOs: 291 and 718), or a modified or unmodified variant thereof.

[2059] A RNAi agent comprising a first and a second strand, wherein the sequences of the first and/or second strands comprise the sequences of a first and/or second strand of: AD-39831.1 (SEQ ID NOs: 292 and 719), or a modified or unmodified variant thereof.

[2060] A RNAi agent comprising a first and a second strand, wherein the sequences of the first and/or second strands comprise the sequences of a first and/or second strand of: AD-39837.1 (SEQ ID NOs: 293 and 720), or a modified or unmodified variant thereof.

[2061] A RNAi agent comprising a first and a second strand, wherein the sequences of the first and/or second strands comprise the sequences of a first and/or second strand of: AD-39843.1 (SEQ ID NOs: 294 and 721), or a modified or unmodified variant thereof.

[2062] A RNAi agent comprising a first and a second strand, wherein the sequences of the first and/or second strands comprise the sequences of a first and/or second strand of: AD-39849.1 (SEQ ID NOs: 295 and 722), or a modified or unmodified variant thereof.

[2063] A RNAi agent comprising a first and a second strand, wherein the sequences of the first and/or second strands comprise the sequences of a first and/or second strand of: AD-39855.1 (SEQ ID NOs: 296 and 723), or a modified or unmodified variant thereof.

[2064] A RNAi agent comprising a first and a second strand, wherein the sequences of the first and/or second strands comprise the sequences of a first and/or second strand of: AD-39861.1 (SEQ ID NOs: 297 and 724), or a modified or unmodified variant thereof.

[2065] A RNAi agent comprising a first and a second strand, wherein the sequences of the first and/or second strands comprise the sequences of a first and/or second strand of: AD-39867.1 (SEQ ID NOs: 298 and 725), or a modified or unmodified variant thereof.

[2066] A RNAi agent comprising a first and a second strand, wherein the sequences of the first and/or second strands comprise the sequences of a first and/or second strand of: AD-39826.1 (SEQ ID NOs: 299 and 726), or a modified or unmodified variant thereof.

[2067] A RNAi agent comprising a first and a second strand, wherein the sequences of the first and/or second strands comprise the sequences of a first and/or second strand of: AD-39832.1 (SEQ ID NOs: 300 and 727), or a modified or unmodified variant thereof.

[2068] A RNAi agent comprising a first and a second strand, wherein the sequences of the first and/or second strands comprise the sequences of a first and/or second strand of: AD-39838.1 (SEQ ID NOs: 301 and 728), or a modified or unmodified variant thereof.

[2069] A RNAi agent comprising a first and a second strand, wherein the sequences of the first and/or second strands comprise the sequences of a first and/or second strand of: AD-39844.1 (SEQ ID NOs: 302 and 729), or a modified or unmodified variant thereof.

[2070] A RNAi agent comprising a first and a second strand, wherein the sequences of the first and/or second strands comprise the sequences of a first and/or second strand of: AD-39850.1 (SEQ ID NOs: 303 and 730), or a modified or unmodified variant thereof.

[2071] A RNAi agent comprising a first and a second strand, wherein the sequences of the first and/or second strands comprise the sequences of a first and/or second strand of: AD-39856.1 (SEQ ID NOs: 304 and 731), or a modified or unmodified variant thereof.

[2072] A RNAi agent comprising a first and a second strand, wherein the sequences of the first and/or second strands comprise the sequences of a first and/or second strand of: AD-39862.1 (SEQ ID NOs: 305 and 732), or a modified or unmodified variant thereof.

[2073] A RNAi agent comprising a first and a second strand, wherein the sequences of the first and/or second strands comprise the sequences of a first and/or second strand of: AD-39868.1 (SEQ ID NOs: 306 and 733), or a modified or unmodified variant thereof.

[2074] A RNAi agent comprising a first and a second strand, wherein the sequences of the first and/or second strands comprise the sequences of a first and/or second strand of: AD-39827.1 (SEQ ID NOs: 307 and 734), or a modified or unmodified variant thereof.

[2075] A RNAi agent comprising a first and a second strand, wherein the sequences of the first and/or second strands comprise the sequences of a first and/or second strand of: AD-39833.1 (SEQ ID NOs: 308 and 735), or a modified or unmodified variant thereof.

[2076] A RNAi agent comprising a first and a second strand, wherein the sequences of the first and/or second strands comprise the sequences of a first and/or second strand of: AD-39839.1 (SEQ ID NOs: 309 and 736), or a modified or unmodified variant thereof.

[2077] A RNAi agent comprising a first and a second strand, wherein the sequences of the first and/or second strands comprise the sequences of a first and/or second strand of: AD-39845.1 (SEQ ID NOs: 310 and 737), or a modified or unmodified variant thereof.

[2078] A RNAi agent comprising a first and a second strand, wherein the sequences of the first and/or second strands comprise the sequences of a first and/or second strand of: AD-39851.1 (SEQ ID NOs: 311 and 738), or a modified or unmodified variant thereof.

[2079] A RNAi agent comprising a first and a second strand, wherein the sequences of the first and/or second strands comprise the sequences of a first and/or second strand of: AD-39857.1 (SEQ ID NOs: 312 and 739), or a modified or unmodified variant thereof.

[2080] A RNAi agent comprising a first and a second strand, wherein the sequences of the first and/or second strands comprise the sequences of a first and/or second strand of: AD-39863.1 (SEQ ID NOs: 313 and 740), or a modified or unmodified variant thereof.

[2081] A RNAi agent comprising a first and a second strand, wherein the sequences of the first and/or second strands comprise the sequences of a first and/or second strand of: AD-39869.1 (SEQ ID NOs: 314 and 741), or a modified or unmodified variant thereof.

[2082] A RNAi agent comprising a first and a second strand, wherein the sequences of the first and/or second strands comprise the sequences of a first and/or second strand of: AD-39828.1 (SEQ ID NOs: 315 and 742), or a modified or unmodified variant thereof.

[2083] A RNAi agent comprising a first and a second strand, wherein the sequences of the first and/or second strands comprise the sequences of a first and/or second strand of: AD-39834.1 (SEQ ID NOs: 316 and 743), or a modified or unmodified variant thereof.

[2084] A RNAi agent comprising a first and a second strand, wherein the sequences of the first and/or second strands comprise the sequences of a first and/or second strand of: AD-39840.1 (SEQ ID NOs: 317 and 744), or a modified or unmodified variant thereof.

[2085] A RNAi agent comprising a first and a second strand, wherein the sequences of the first and/or second strands comprise the sequences of a first and/or second strand of: AD-39846.1 (SEQ ID NOs: 318 and 745), or a modified or unmodified variant thereof.

[2086] A RNAi agent comprising a first and a second strand, wherein the sequences of the first and/or second strands comprise the sequences of a first and/or second strand of: AD-39852.1 (SEQ ID NOs: 319 and 746), or a modified or unmodified variant thereof.

[2087] A RNAi agent comprising a first and a second strand, wherein the sequences of the first and/or second strands comprise the sequences of a first and/or second strand of: AD-39858.1 (SEQ ID NOs: 320 and 747), or a modified or unmodified variant thereof.

[2088] A RNAi agent comprising a first and a second strand, wherein the sequences of the first and/or second strands comprise the sequences of a first and/or second strand of: AD-39864.1 (SEQ ID NOs: 321 and 748), or a modified or unmodified variant thereof.

[2089] A RNAi agent comprising a first and a second strand, wherein the sequences of the first and/or second strands comprise the sequences of a first and/or second strand of: AD-39870.1 (SEQ ID NOs: 322 and 749), or a modified or unmodified variant thereof.

[2090] A RNAi agent comprising a first and a second strand, wherein the sequences of the first and/or second strands comprise the sequences of a first and/or second strand of: AD-39829.1 (SEQ ID NOs: 323 and 750), or a modified or unmodified variant thereof.

[2091] A RNAi agent comprising a first and a second strand, wherein the sequences of the first and/or second strands comprise the sequences of a first and/or second strand of: AD-39835.1 (SEQ ID NOs: 324 and 751), or a modified or unmodified variant thereof.

[2092] A RNAi agent comprising a first and a second strand, wherein the sequences of the first and/or second strands comprise the sequences of a first and/or second strand of: AD-39841.1 (SEQ ID NOs: 325 and 752), or a modified or unmodified variant thereof.

[2093] A RNAi agent comprising a first and a second strand, wherein the sequences of the first and/or second strands comprise the sequences of a first and/or second strand of: AD-39853.1 (SEQ ID NOs: 326 and 753), or a modified or unmodified variant thereof.

[2094] A RNAi agent comprising a first and a second strand, wherein the sequences of the first and/or second strands comprise the sequences of a first and/or second strand of: AD-39859.1 (SEQ ID NOs: 327 and 754), or a modified or unmodified variant thereof.

[2095] A RNAi agent comprising a first and a second strand, wherein the sequences of the first and/or second strands comprise the sequences of a first and/or second strand of: AD-39865.1 (SEQ ID NOs: 328 and 755), or a modified or unmodified variant thereof.

[2096] A RNAi agent comprising a first and a second strand, wherein the sequences of the first and/or second strands comprise the sequences of a first and/or second strand of: AD-39871.1 (SEQ ID NOs: 329 and 756), or a modified or unmodified variant thereof.

[2097] A RNAi agent comprising a first and a second strand, wherein the sequences of the first and/or second strands comprise the sequences of a first and/or second strand of: AD-39830.1 (SEQ ID NOs: 330 and 757), or a modified or unmodified variant thereof.

[2098] A RNAi agent comprising a first and a second strand, wherein the sequences of the first and/or second strands comprise the sequences of a first and/or second strand of: AD-39836.1 (SEQ ID NOs: 331 and 758), or a modified or unmodified variant thereof.

[2099] A RNAi agent comprising a first and a second strand, wherein the sequences of the first and/or second strands comprise the sequences of a first and/or second strand of: AD-39842.1 (SEQ ID NOs: 332 and 759), or a modified or unmodified variant thereof.

[2100] A RNAi agent comprising a first and a second strand, wherein the sequences of the first and/or second strands comprise the sequences of a first and/or second strand of: AD-39848.1 (SEQ ID NOs: 333 and 760), or a modified or unmodified variant thereof.

[2101] A RNAi agent comprising a first and a second strand, wherein the sequences of the first and/or second strands comprise the sequences of a first and/or second strand of: AD-39854.1 (SEQ ID NOs: 334 and 761), or a modified or unmodified variant thereof.

[2102] A RNAi agent comprising a first and a second strand, wherein the sequences of the first and/or second strands comprise the sequences of a first and/or second strand of: AD-39860.1 (SEQ ID NOs: 335 and 762), or a modified or unmodified variant thereof.

[2103] A RNAi agent comprising a first and a second strand, wherein the sequences of the first and/or second strands comprise the sequences of a first and/or second strand of: AD-39866.1 (SEQ ID NOs: 336 and 763), or a modified or unmodified variant thereof.

[2104] A RNAi agent comprising a first and a second strand, wherein the sequences of the first and/or second strands comprise the sequences of a first and/or second strand of: AD-39992.1 (SEQ ID NOs: 337 and 764), or a modified or unmodified variant thereof.

[2105] A RNAi agent comprising a first and a second strand, wherein the sequences of the first and/or second strands comprise the sequences of a first and/or second strand of: AD-39998.1 (SEQ ID NOs: 338 and 765), or a modified or unmodified variant thereof.

[2106] A RNAi agent comprising a first and a second strand, wherein the sequences of the first and/or second strands comprise the sequences of a first and/or second strand of: AD-40004.1 (SEQ ID NOs: 339 and 766), or a modified or unmodified variant thereof.

[2107] A RNAi agent comprising a first and a second strand, wherein the sequences of the first and/or second strands comprise the sequences of a first and/or second strand of: AD-40010.1 (SEQ ID NOs: 340 and 767), or a modified or unmodified variant thereof.

[2108] A RNAi agent comprising a first and a second strand, wherein the sequences of the first and/or second strands comprise the sequences of a first and/or second strand of: AD-40016.1 (SEQ ID NOs: 341 and 768), or a modified or unmodified variant thereof.

[2109] A RNAi agent comprising a first and a second strand, wherein the sequences of the first and/or second strands comprise the sequences of a first and/or second strand of: AD-40022.1 (SEQ ID NOs: 342 and 769), or a modified or unmodified variant thereof.

[2110] A RNAi agent comprising a first and a second strand, wherein the sequences of the first and/or second strands comprise the sequences of a first and/or second strand of: AD-40028.1 (SEQ ID NOs: 343 and 770), or a modified or unmodified variant thereof.

[2111] A RNAi agent comprising a first and a second strand, wherein the sequences of the first and/or second strands comprise the sequences of a first and/or second strand of: AD-40034.1 (SEQ ID NOs: 344 and 771), or a modified or unmodified variant thereof.

[2112] A RNAi agent comprising a first and a second strand, wherein the sequences of the first and/or second strands comprise the sequences of a first and/or second strand of: AD-39999.1 (SEQ ID NOs: 345 and 772), or a modified or unmodified variant thereof.

[2113] A RNAi agent comprising a first and a second strand, wherein the sequences of the first and/or second strands comprise the sequences of a first and/or second strand of: AD-40005.1 (SEQ ID NOs: 346 and 773), or a modified or unmodified variant thereof.

[2114] A RNAi agent comprising a first and a second strand, wherein the sequences of the first and/or second strands comprise the sequences of a first and/or second strand of: AD-40011.1 (SEQ ID NOs: 347 and 774), or a modified or unmodified variant thereof.

[2115] A RNAi agent comprising a first and a second strand, wherein the sequences of the first and/or second strands comprise the sequences of a first and/or second strand of: AD-40017.1 (SEQ ID NOs: 348 and 775), or a modified or unmodified variant thereof.

[2116] A RNAi agent comprising a first and a second strand, wherein the sequences of the first and/or second strands comprise the sequences of a first and/or second strand of: AD-40029.1 (SEQ ID NOs: 349 and 776), or a modified or unmodified variant thereof.

[2117] A RNAi agent comprising a first and a second strand, wherein the sequences of the first and/or second strands comprise the sequences of a first and/or second strand of: AD-40035.1 (SEQ ID NOs: 350 and 777), or a modified or unmodified variant thereof.

[2118] A RNAi agent comprising a first and a second strand, wherein the sequences of the first and/or second strands comprise the sequences of a first and/or second strand of: AD-39994.1 (SEQ ID NOs: 351 and 778), or a modified or unmodified variant thereof.

[2119] A RNAi agent comprising a first and a second strand, wherein the sequences of the first and/or second strands comprise the sequences of a first and/or second strand of: AD-40000.1 (SEQ ID NOs: 352 and 779), or a modified or unmodified variant thereof.

[2120] A RNAi agent comprising a first and a second strand, wherein the sequences of the first and/or second strands comprise the sequences of a first and/or second strand of: AD-40006.1 (SEQ ID NOs: 353 and 780), or a modified or unmodified variant thereof.

[2121] A RNAi agent comprising a first and a second strand, wherein the sequences of the first and/or second strands comprise the sequences of a first and/or second strand of: AD-40012.1 (SEQ ID NOs: 354 and 781), or a modified or unmodified variant thereof.

[2122] A RNAi agent comprising a first and a second strand, wherein the sequences of the first and/or second strands comprise the sequences of a first and/or second strand of: AD-40018.1 (SEQ ID NOs: 355 and 782), or a modified or unmodified variant thereof.

[2123] A RNAi agent comprising a first and a second strand, wherein the sequences of the first and/or second strands comprise the sequences of a first and/or second strand of: AD-40024.1 (SEQ ID NOs: 356 and 783), or a modified or unmodified variant thereof.

[2124] A RNAi agent comprising a first and a second strand, wherein the sequences of the first and/or second strands comprise the sequences of a first and/or second strand of: AD-40030.1 (SEQ ID NOs: 357 and 784), or a modified or unmodified variant thereof.

[2125] A RNAi agent comprising a first and a second strand, wherein the sequences of the first and/or second strands comprise the sequences of a first and/or second strand of: AD-40036.1 (SEQ ID NOs: 358 and 785), or a modified or unmodified variant thereof.

[2126] A RNAi agent comprising a first and a second strand, wherein the sequences of the first and/or second strands comprise the sequences of a first and/or second strand of: AD-39995.1 (SEQ ID NOs: 359 and 786), or a modified or unmodified variant thereof.

[2127] A RNAi agent comprising a first and a second strand, wherein the sequences of the first and/or second strands comprise the sequences of a first and/or second strand of: AD-40001.1 (SEQ ID NOs: 360 and 787), or a modified or unmodified variant thereof.

[2128] A RNAi agent comprising a first and a second strand, wherein the sequences of the first and/or second strands comprise the sequences of a first and/or second strand of: AD-40007.1 (SEQ ID NOs: 361 and 788), or a modified or unmodified variant thereof.

[2129] A RNAi agent comprising a first and a second strand, wherein the sequences of the first and/or second strands comprise the sequences of a first and/or second strand of: AD-40013.1 (SEQ ID NOs: 362 and 789), or a modified or unmodified variant thereof.

[2130] A RNAi agent comprising a first and a second strand, wherein the sequences of the first and/or second strands comprise the sequences of a first and/or second strand of: AD-40019.1 (SEQ ID NOs: 363 and 790), or a modified or unmodified variant thereof.

[2131] A RNAi agent comprising a first and a second strand, wherein the sequences of the first and/or second strands comprise the sequences of a first and/or second strand of: AD-40025.1 (SEQ ID NOs: 364 and 791), or a modified or unmodified variant thereof.

[2132] A RNAi agent comprising a first and a second strand, wherein the sequences of the first and/or second strands comprise the sequences of a first and/or second strand of: AD-40031.1 (SEQ ID NOs: 365 and 792), or a modified or unmodified variant thereof.

[2133] A RNAi agent comprising a first and a second strand, wherein the sequences of the first and/or second strands comprise the sequences of a first and/or second strand of: AD-40037.1 (SEQ ID NOs: 366 and 793), or a modified or unmodified variant thereof.

[2134] A RNAi agent comprising a first and a second strand, wherein the sequences of the first and/or second strands comprise the sequences of a first and/or second strand of: AD-39996.1 (SEQ ID NOs: 367 and 794), or a modified or unmodified variant thereof.

[2135] A RNAi agent comprising a first and a second strand, wherein the sequences of the first and/or second strands comprise the sequences of a first and/or second strand of: AD-40002.1 (SEQ ID NOs: 368 and 795), or a modified or unmodified variant thereof.

[2136] A RNAi agent comprising a first and a second strand, wherein the sequences of the first and/or second strands comprise the sequences of a first and/or second strand of: AD-40008.1 (SEQ ID NOs: 369 and 796), or a modified or unmodified variant thereof.

[2137] A RNAi agent comprising a first and a second strand, wherein the sequences of the first and/or second strands comprise the sequences of a first and/or second strand of: AD-40014.1 (SEQ ID NOs: 370 and 797), or a modified or unmodified variant thereof.

[2138] A RNAi agent comprising a first and a second strand, wherein the sequences of the first and/or second strands comprise the sequences of a first and/or second strand of: AD-40020.1 (SEQ ID NOs: 371 and 798), or a modified or unmodified variant thereof.

[2139] A RNAi agent comprising a first and a second strand, wherein the sequences of the first and/or second strands comprise the sequences of a first and/or second strand of: AD-40026.1 (SEQ ID NOs: 372 and 799), or a modified or unmodified variant thereof.

[2140] A RNAi agent comprising a first and a second strand, wherein the sequences of the first and/or second strands comprise the sequences of a first and/or second strand of: AD-40032.1 (SEQ ID NOs: 373 and 800), or a modified or unmodified variant thereof.

[2141] A RNAi agent comprising a first and a second strand, wherein the sequences of the first and/or second strands comprise the sequences of a first and/or second strand of: AD-40038.1 (SEQ ID NOs: 374 and 801), or a modified or unmodified variant thereof.

[2142] A RNAi agent comprising a first and a second strand, wherein the sequences of the first and/or second strands comprise the sequences of a first and/or second strand of: AD-39997.1 (SEQ ID NOs: 375 and 802), or a modified or unmodified variant thereof.

[2143] A RNAi agent comprising a first and a second strand, wherein the sequences of the first and/or second strands comprise the sequences of a first and/or second strand of: AD-40009.1 (SEQ ID NOs: 376 and 803), or a modified or unmodified variant thereof.

[2144] A RNAi agent comprising a first and a second strand, wherein the sequences of the first and/or second strands comprise the sequences of a first and/or second strand of: AD-40015.1 (SEQ ID NOs: 377 and 804), or a modified or unmodified variant thereof.

[2145] A RNAi agent comprising a first and a second strand, wherein the sequences of the first and/or second strands comprise the sequences of a first and/or second strand of: AD-40021.1 (SEQ ID NOs: 378 and 805), or a modified or unmodified variant thereof.

[2146] A RNAi agent comprising a first and a second strand, wherein the sequences of the first and/or second strands comprise the sequences of a first and/or second strand of: AD-40027.1 (SEQ ID NOs: 379 and 806), or a modified or unmodified variant thereof.

[2147] A RNAi agent comprising a first and a second strand, wherein the sequences of the first and/or second strands comprise the sequences of a first and/or second strand of: AD-40033.1 (SEQ ID NOs: 380 and 807), or a modified or unmodified variant thereof.

[2148] A RNAi agent comprising a first and a second strand, wherein the sequences of the first and/or second strands comprise the sequences of a first and/or second strand of: AD-40039.1 (SEQ ID NOs: 381 and 808), or a modified or unmodified variant thereof.

[2149] A RNAi agent comprising a first and a second strand, wherein the sequences of the first and/or second strands comprise the sequences of a first and/or second strand of: AD-40045.1 (SEQ ID NOs: 382 and 809), or a modified or unmodified variant thereof.

[2150] A RNAi agent comprising a first and a second strand, wherein the sequences of the first and/or second strands comprise the sequences of a first and/or second strand of: AD-40051.1 (SEQ ID NOs: 383 and 810), or a modified or unmodified variant thereof.

[2151] A RNAi agent comprising a first and a second strand, wherein the sequences of the first and/or second strands comprise the sequences of a first and/or second strand of: AD-40057.1 (SEQ ID NOs: 384 and 811), or a modified or unmodified variant thereof.

[2152] A RNAi agent comprising a first and a second strand, wherein the sequences of the first and/or second strands comprise the sequences of a first and/or second strand of: AD-40063.1 (SEQ ID NOs: 385 and 812), or a modified or unmodified variant thereof.

[2153] A RNAi agent comprising a first and a second strand, wherein the sequences of the first and/or second strands comprise the sequences of a first and/or second strand of: AD-40069.1 (SEQ ID NOs: 386 and 813), or a modified or unmodified variant thereof.

[2154] A RNAi agent comprising a first and a second strand, wherein the sequences of the first and/or second strands comprise the sequences of a first and/or second strand of: AD-40075.1 (SEQ ID NOs: 387 and 814), or a modified or unmodified variant thereof.

[2155] A RNAi agent comprising a first and a second strand, wherein the sequences of the first and/or second strands comprise the sequences of a first and/or second strand of: AD-40081.1 (SEQ ID NOs: 388 and 815), or a modified or unmodified variant thereof.

[2156] A RNAi agent comprising a first and a second strand, wherein the sequences of the first and/or second strands comprise the sequences of a first and/or second strand of: AD-40040.1 (SEQ ID NOs: 389 and 816), or a modified or unmodified variant thereof.

[2157] A RNAi agent comprising a first and a second strand, wherein the sequences of the first and/or second strands comprise the sequences of a first and/or second strand of: AD-40046.1 (SEQ ID NOs: 390 and 817), or a modified or unmodified variant thereof.

[2158] A RNAi agent comprising a first and a second strand, wherein the sequences of the first and/or second strands comprise the sequences of a first and/or second strand of: AD-40052.1 (SEQ ID NOs: 391 and 818), or a modified or unmodified variant thereof.

[2159] A RNAi agent comprising a first and a second strand, wherein the sequences of the first and/or second strands comprise the sequences of a first and/or second strand of: AD-40058.1 (SEQ ID NOs: 392 and 819), or a modified or unmodified variant thereof.

[2160] A RNAi agent comprising a first and a second strand, wherein the sequences of the first and/or second strands comprise the sequences of a first and/or second strand of: AD-40064.1 (SEQ ID NOs: 393 and 820), or a modified or unmodified variant thereof.

[2161] A RNAi agent comprising a first and a second strand, wherein the sequences of the first and/or second strands comprise the sequences of a first and/or second strand of: AD-40070.1 (SEQ ID NOs: 394 and 821), or a modified or unmodified variant thereof.

[2162] A RNAi agent comprising a first and a second strand, wherein the sequences of the first and/or second strands comprise the sequences of a first and/or second strand of: AD-40076.1 (SEQ ID NOs: 395 and 822), or a modified or unmodified variant thereof.

[2163] A RNAi agent comprising a first and a second strand, wherein the sequences of the first and/or second strands comprise the sequences of a first and/or second strand of: AD-40082.1 (SEQ ID NOs: 396 and 823), or a modified or unmodified variant thereof.

[2164] A RNAi agent comprising a first and a second strand, wherein the sequences of the first and/or second strands comprise the sequences of a first and/or second strand of: AD-40041.1 (SEQ ID NOs: 397 and 824), or a modified or unmodified variant thereof.

[2165] A RNAi agent comprising a first and a second strand, wherein the sequences of the first and/or second strands comprise the sequences of a first and/or second strand of: AD-40047.1 (SEQ ID NOs: 398 and 825), or a modified or unmodified variant thereof.

[2166] A RNAi agent comprising a first and a second strand, wherein the sequences of the first and/or second strands comprise the sequences of a first and/or second strand of: AD-40053.1 (SEQ ID NOs: 399 and 826), or a modified or unmodified variant thereof.

[2167] A RNAi agent comprising a first and a second strand, wherein the sequences of the first and/or second strands comprise the sequences of a first and/or second strand of: AD-40059.1 (SEQ ID NOs: 400 and 827), or a modified or unmodified variant thereof.

[2168] A RNAi agent comprising a first and a second strand, wherein the sequences of the first and/or second strands comprise the sequences of a first and/or second strand of: AD-40065.1 (SEQ ID NOs: 401 and 828), or a modified or unmodified variant thereof.

[2169] A RNAi agent comprising a first and a second strand, wherein the sequences of the first and/or second strands comprise the sequences of a first and/or second strand of: AD-40071.1 (SEQ ID NOs: 402 and 829), or a modified or unmodified variant thereof.

[2170] A RNAi agent comprising a first and a second strand, wherein the sequences of the first and/or second strands comprise the sequences of a first and/or second strand of: AD-40077.1 (SEQ ID NOs: 403 and 830), or a modified or unmodified variant thereof.

[2171] A RNAi agent comprising a first and a second strand, wherein the sequences of the first and/or second strands comprise the sequences of a first and/or second strand of: AD-40083.1 (SEQ ID NOs: 404 and 831), or a modified or unmodified variant thereof.

[2172] A RNAi agent comprising a first and a second strand, wherein the sequences of the first and/or second strands comprise the sequences of a first and/or second strand of: AD-40042.1 (SEQ ID NOs: 405 and 832), or a modified or unmodified variant thereof.

[2173] A RNAi agent comprising a first and a second strand, wherein the sequences of the first and/or second strands comprise the sequences of a first and/or second strand of: AD-40048.1 (SEQ ID NOs: 406 and 833), or a modified or unmodified variant thereof.

[2174] A RNAi agent comprising a first and a second strand, wherein the sequences of the first and/or second strands comprise the sequences of a first and/or second strand of: AD-40054.1 (SEQ ID NOs: 407 and 834), or a modified or unmodified variant thereof.

[2175] A RNAi agent comprising a first and a second strand, wherein the sequences of the first and/or second strands comprise the sequences of a first and/or second strand of: AD-40060.1 (SEQ ID NOs: 408 and 835), or a modified or unmodified variant thereof.

[2176] A RNAi agent comprising a first and a second strand, wherein the sequences of the first and/or second strands comprise the sequences of a first and/or second strand of: AD-40066.1 (SEQ ID NOs: 409 and 836), or a modified or unmodified variant thereof.

[2177] A RNAi agent comprising a first and a second strand, wherein the sequences of the first and/or second strands comprise the sequences of a first and/or second strand of: AD-40072.1 (SEQ ID NOs: 410 and 837), or a modified or unmodified variant thereof.

[2178] A RNAi agent comprising a first and a second strand, wherein the sequences of the first and/or second strands comprise the sequences of a first and/or second strand of: AD-40078.1 (SEQ ID NOs: 411 and 838), or a modified or unmodified variant thereof.

[2179] A RNAi agent comprising a first and a second strand, wherein the sequences of the first and/or second strands comprise the sequences of a first and/or second strand of: AD-40084.1 (SEQ ID NOs: 412 and 839), or a modified or unmodified variant thereof.

[2180] A RNAi agent comprising a first and a second strand, wherein the sequences of the first and/or second strands comprise the sequences of a first and/or second strand of: AD-40043.1 (SEQ ID NOs: 413 and 840), or a modified or unmodified variant thereof.

[2181] A RNAi agent comprising a first and a second strand, wherein the sequences of the first and/or second strands comprise the sequences of a first and/or second strand of: AD-40049.1 (SEQ ID NOs: 414 and 841), or a modified or unmodified variant thereof.

[2182] A RNAi agent comprising a first and a second strand, wherein the sequences of the first and/or second strands comprise the sequences of a first and/or second strand of: AD-40055.1 (SEQ ID NOs: 415 and 842), or a modified or unmodified variant thereof.

[2183] A RNAi agent comprising a first and a second strand, wherein the sequences of the first and/or second strands comprise the sequences of a first and/or second strand of: AD-40061.1 (SEQ ID NOs: 416 and 843), or a modified or unmodified variant thereof.

[2184] A RNAi agent comprising a first and a second strand, wherein the sequences of the first and/or second strands comprise the sequences of a first and/or second strand of: AD-40067.1 (SEQ ID NOs: 417 and 844), or a modified or unmodified variant thereof.

[2185] A RNAi agent comprising a first and a second strand, wherein the sequences of the first and/or second strands comprise the sequences of a first and/or second strand of: AD-40073.1 (SEQ ID NOs: 418 and 845), or a modified or unmodified variant thereof.

[2186] A RNAi agent comprising a first and a second strand, wherein the sequences of the first and/or second strands comprise the sequences of a first and/or second strand of: AD-40079.1 (SEQ ID NOs: 419 and 846), or a modified or unmodified variant thereof.

[2187] A RNAi agent comprising a first and a second strand, wherein the sequences of the first and/or second strands comprise the sequences of a first and/or second strand of: AD-40085.1 (SEQ ID NOs: 420 and 847), or a modified or unmodified variant thereof.

[2188] A RNAi agent comprising a first and a second strand, wherein the sequences of the first and/or second strands comprise the sequences of a first and/or second strand of: AD-40044.1 (SEQ ID NOs: 421 and 848), or a modified or unmodified variant thereof.

[2189] A RNAi agent comprising a first and a second strand, wherein the sequences of the first and/or second strands comprise the sequences of a first and/or second strand of: AD-40050.1 (SEQ ID NOs: 422 and 849), or a modified or unmodified variant thereof.

[2190] A RNAi agent comprising a first and a second strand, wherein the sequences of the first and/or second strands comprise the sequences of a first and/or second strand of: AD-40056.1 (SEQ ID NOs: 423 and 850), or a modified or unmodified variant thereof.

[2191] A RNAi agent comprising a first and a second strand, wherein the sequences of the first and/or second strands comprise the sequences of a first and/or second strand of: AD-40062.1 (SEQ ID NOs: 424 and 851), or a modified or unmodified variant thereof.

[2192] A RNAi agent comprising a first and a second strand, wherein the sequences of the first and/or second strands comprise the sequences of a first and/or second strand of: AD-40068.1 (SEQ ID NOs: 425 and 852), or a modified or unmodified variant thereof.

[2193] A RNAi agent comprising a first and a second strand, wherein the sequences of the first and/or second strands comprise the sequences of a first and/or second strand of: AD-40074.1 (SEQ ID NOs: 426 and 853), or a modified or unmodified variant thereof.

[2194] A RNAi agent comprising a first and a second strand, wherein the sequences of the first and/or second strands comprise the sequences of a first and/or second strand of: AD-40080.1 (SEQ ID NOs: 427 and 854), or a modified or unmodified variant thereof.

[2195] A RNAi agent comprising a first and a second strand, wherein the sequences of the first and/or second strands comprise the sequences of a first and/or second strand of: AD-39720.1 (SEQ ID NOs: 1716 and 1754), or a modified or unmodified variant thereof.

[2196] A RNAi agent comprising a first and a second strand, wherein the sequences of the first and/or second strands comprise the sequences of a first and/or second strand of: AD-39706.1 (SEQ ID NOs: 1717 and 1755), or a modified or unmodified variant thereof.

[2197] A RNAi agent comprising a first and a second strand, wherein the sequences of the first and/or second strands comprise the sequences of a first and/or second strand of: AD-39712.1 (SEQ ID NOs: 1718 and 1756), or a modified or unmodified variant thereof.

[2198] A RNAi agent comprising a first and a second strand, wherein the sequences of the first and/or second strands comprise the sequences of a first and/or second strand of: AD-39760.1 (SEQ ID NOs: 1719 and 1757), or a modified or unmodified variant thereof.

[2199] A RNAi agent comprising a first and a second strand, wherein the sequences of the first and/or second strands comprise the sequences of a first and/or second strand of: AD-39732.1 (SEQ ID NOs: 1720 and 1758), or a modified or unmodified variant thereof.

[2200] A RNAi agent comprising a first and a second strand, wherein the sequences of the first and/or second strands comprise the sequences of a first and/or second strand of: AD-35541.4 (SEQ ID NOs: 1721 and 1759), or a modified or unmodified variant thereof.

[2201] A RNAi agent comprising a first and a second strand, wherein the sequences of the first and/or second strands comprise the sequences of a first and/or second strand of: AD-39735.1 or hs_KRAS_{—}321_A22S26 (SEQ ID NOs: 1722 and 1760), or a modified or unmodified variant thereof.

[2202] A RNAi agent comprising a first and a second strand, wherein the sequences of the first and/or second strands comprise the sequences of a first and/or second strand of: AD-39741.1, or modified or unmodified variants thereof.

[2203] A RNAi agent comprising a first and a second strand, wherein the sequences of the first and/or second strands comprise the sequences of a first and/or second strand of: hs_KRAS_{—} 322_A22S26 (SEQ ID NOs: 1723 and 1761), or a modified or unmodified variant thereof.

[2204] A RNAi agent comprising a first and a second strand, wherein the sequences of the first and/or second strands comprise the sequences of a first and/or second strand of: AD-39778.1 (SEQ ID NOs: 1724 and 1762), or a modified or unmodified variant thereof.

[2205] A RNAi agent comprising a first and a second strand, wherein the sequences of the first and/or second strands comprise the sequences of a first and/or second strand of: AD-39790.1 (SEQ ID NOs: 1725 and 1763), or a modified or unmodified variant thereof.

[2206] A RNAi agent comprising a first and a second strand, wherein the sequences of the first and/or second strands comprise the sequences of a first and/or second strand of: AD-39822.1 (SEQ ID NOs: 1726 and 1764), or a modified or unmodified variant thereof.

[2207] A RNAi agent comprising a first and a second strand, wherein the sequences of the first and/or second strands comprise the sequences of a first and/or second strand of: AD-35609.4 (SEQ ID NOs: 1727 and 1765), or a modified or unmodified variant thereof.

[2208] A RNAi agent comprising a first and a second strand, wherein the sequences of the first and/or second strands comprise the sequences of a first and/or second strand of: AD-35581.4 (SEQ ID NOs: 1728 and 1766), or a modified or unmodified variant thereof.

[2209] A RNAi agent comprising a first and a second strand, wherein the sequences of the first and/or second strands comprise the sequences of a first and/or second strand of: AD-39845.1 (SEQ ID NOs: 1729 and 1767), or a modified or unmodified variant thereof.

[2210] A RNAi agent comprising a first and a second strand, wherein the sequences of the first and/or second strands comprise the sequences of a first and/or second strand of: AD-39858.1 (SEQ ID NOs: 1730 and 1768), or a modified or unmodified variant thereof.

[2211] A RNAi agent comprising a first and a second strand, wherein the sequences of the first and/or second strands comprise the sequences of a first and/or second strand of: AD-39870.1 (SEQ ID NOs: 1731 and 1769), or a modified or unmodified variant thereof.

[2212] A RNAi agent comprising a first and a second strand, wherein the sequences of the first and/or second strands comprise the sequences of a first and/or second strand of: AD-35576.4 (SEQ ID NOs: 1732 and 1770), or a modified or unmodified variant thereof.

[2213] A RNAi agent comprising a first and a second strand, wherein the sequences of the first and/or second strands comprise the sequences of a first and/or second strand of: AD-35588.4 (SEQ ID NOs: 1733 and 1771), or a modified or unmodified variant thereof.

[2214] A RNAi agent comprising a first and a second strand, wherein the sequences of the first and/or second strands comprise the sequences of a first and/or second strand of: AD-35600.1 (SEQ ID NOs: 1734 and 1772), or a modified or unmodified variant thereof.

[2215] A RNAi agent comprising a first and a second strand, wherein the sequences of the first and/or second strands comprise the sequences of a first and/or second strand of: AD-35606.1 (SEQ ID NOs: 1735 and 1773), or a modified or unmodified variant thereof.

[2216] A RNAi agent comprising a first and a second strand, wherein the sequences of the first and/or second strands comprise the sequences of a first and/or second strand of: AD-38151.1 (SEQ ID NOs: 1736 and 1774), or a modified or unmodified variant thereof.

[2217] A RNAi agent comprising a first and a second strand, wherein the sequences of the first and/or second strands comprise the sequences of a first and/or second strand of: AD-38163.1 (SEQ ID NOs: 1737 and 1775), or a modified or unmodified variant thereof.

[2218] A RNAi agent comprising a first and a second strand, wherein the sequences of the first and/or second strands comprise the sequences of a first and/or second strand of: AD-39999.1 (SEQ ID NOs: 1738 and 1776), or a modified or unmodified variant thereof.

[2219] A RNAi agent comprising a first and a second strand, wherein the sequences of the first and/or second strands comprise the sequences of a first and/or second strand of: AD-38159.1 or hs_KRAS_{—}528_A22S26 (SEQ ID NOs: 1739 and 1777), or a modified or unmodified variant thereof.

[2220] A RNAi agent comprising a first and a second strand, wherein the sequences of the first and/or second strands comprise the sequences of a first and/or second strand of: AD-38130.1 or hs_KRAS_{—}531_A22S26 (SEQ ID NOs: 1740 and 1778), or a modified or unmodified variant thereof.

[2221] A RNAi agent comprising a first and a second strand, wherein the sequences of the first and/or second strands comprise the sequences of a first and/or second strand of: AD-38136.1 (SEQ ID NOs: 1741 and 1779), or a modified or unmodified variant thereof.

[2222] A RNAi agent comprising a first and a second strand, wherein the sequences of the first and/or second strands comprise the sequences of a first and/or second strand of: AD-40036.1 (SEQ ID NOs: 1742 and 1780), or a modified or unmodified variant thereof.

[2223] A RNAi agent comprising a first and a second strand, wherein the sequences of the first and/or second strands comprise the sequences of a first and/or second strand of: AD-40008.1 (SEQ ID NOs: 1743 and 1781), or a modified or unmodified variant thereof.

[2224] A RNAi agent comprising a first and a second strand, wherein the sequences of the first and/or second strands comprise the sequences of a first and/or second strand of: AD-40021.1 (SEQ ID NOs: 1744 and 1782), or a modified or unmodified variant thereof.

[2225] A RNAi agent comprising a first and a second strand, wherein the sequences of the first and/or second strands comprise the sequences of a first and/or second strand of: AD-40077.1 (SEQ ID NOs: 1745 and 1783), or a modified or unmodified variant thereof.

[2226] A RNAi agent comprising a first and a second strand, wherein the sequences of the first and/or second strands comprise the sequences of a first and/or second strand of: AD-40072.1 (SEQ ID NOs: 1746 and 1784), or a modified or unmodified variant thereof.

[2227] A RNAi agent comprising a first and a second strand, wherein the sequences of the first and/or second strands comprise the sequences of a first and/or second strand of: AD-40061.1 (SEQ ID NOs: 1747 and 1785), or a modified or unmodified variant thereof.

[2228] A RNAi agent comprising a first and a second strand, wherein the sequences of the first and/or second strands comprise the sequences of a first and/or second strand of: AD-40068.1 (SEQ ID NOs: 1748 and 1786), or a modified or unmodified variant thereof.

[2229] A RNAi agent comprising a first and a second strand, wherein the sequences of the first and/or second strands comprise the sequences of a first and/or second strand of: AD-38131.1 (SEQ ID NOs: 1749 and 1787), or a modified or unmodified variant thereof.

[2230] A RNAi agent comprising a first and a second strand, wherein the sequences of the first and/or second strands comprise the sequences of a first and/or second strand of: AD-38167.1 (SEQ ID NOs: 1750 and 1788), or a modified or unmodified variant thereof.

[2231] A RNAi agent comprising a first and a second strand, wherein the sequences of the first and/or second strands comprise the sequences of a first and/or second strand of: hs_KRAS 1273_A22S26 (SEQ ID NOs: 1751 and 1789), or a modified or unmodified variant thereof.

[2232] A RNAi agent comprising a first and a second strand, wherein the sequences of the first and/or second strands comprise the sequences of a first and/or second strand of: hs_KRAS 2892_A37S26 (SEQ ID NOs: 1752 and 1790), or a modified or unmodified variant thereof.

[2233] A RNAi agent comprising a first and a second strand, wherein the sequences of the first and/or second strands comprise the sequences of a first and/or second strand of: hs_KRAS 4731_A22S26 (SEQ ID NOs: 1753 and 1791), or a modified or unmodified variant thereof.

[2234] Specific embodiments wherein the sequences of the first and/or second strands are the sequences of the first and/or second strands of a RNAi agent disclosed herein

[2235] In one embodiment, the present disclosure pertains to a composition comprising any one or more of: a RNAi agent comprising a first and a second strand, wherein the sequences of the first and/or second strands are the sequences of the first and/or second strands of any RNAi agent from any of Tables 1 to 6, or modified and unmodified variants thereof.

[2236] Thus, in various embodiments, the present disclosure pertains to a composition comprising any one or more of the following:

[2237] A RNAi agent comprising a first and a second strand, wherein the sequences of the first and/or second strands are the sequences of the first and/or second strands of: AD-35523.3 (SEQ ID NOs: 1 and 428), or a modified or unmodified variant thereof.

[2238] A RNAi agent comprising a first and a second strand, wherein the sequences of the first and/or second strands are the sequences of the first and/or second strands of: AD-35529.1 (SEQ ID NOs: 2 and 429), or a modified or unmodified variant thereof.

[2239] A RNAi agent comprising a first and a second strand, wherein the sequences of the first and/or second strands are the sequences of the first and/or second strands of: AD-35535.4 (SEQ ID NOs: 3 and 430), or a modified or unmodified variant thereof.

[2240] A RNAi agent comprising a first and a second strand, wherein the sequences of the first and/or second strands are the sequences of the first and/or second strands of: AD-35541.4 (SEQ ID NOs: 4 and 431), or a modified or unmodified variant thereof.

[2241] A RNAi agent comprising a first and a second strand, wherein the sequences of the first and/or second strands are the sequences of the first and/or second strands of: AD-35547.4 (SEQ ID NOs: 5 and 432), or a modified or unmodified variant thereof.

[2242] A RNAi agent comprising a first and a second strand, wherein the sequences of the first and/or second strands are the sequences of the first and/or second strands of: AD-35553.4 (SEQ ID NOs: 6 and 433), or a modified or unmodified variant thereof.

[2243] A RNAi agent comprising a first and a second strand, wherein the sequences of the first and/or second strands are the sequences of the first and/or second strands of: AD-35559.4 (SEQ ID NOs: 7 and 434), or a modified or unmodified variant thereof.

[2244] A RNAi agent comprising a first and a second strand, wherein the sequences of the first and/or second strands are the sequences of the first and/or second strands of: AD-35565.4 (SEQ ID NOs: 8 and 435), or a modified or unmodified variant thereof.

[2245] A RNAi agent comprising a first and a second strand, wherein the sequences of the first and/or second strands are the sequences of the first and/or second strands of: AD-35524.4 (SEQ ID NOs: 9 and 436), or a modified or unmodified variant thereof.

[2246] A RNAi agent comprising a first and a second strand, wherein the sequences of the first and/or second strands are the sequences of the first and/or second strands of: AD-35530.4 (SEQ ID NOs: 10 and 437), or a modified or unmodified variant thereof.

[2247] A RNAi agent comprising a first and a second strand, wherein the sequences of the first and/or second strands are the sequences of the first and/or second strands of: AD-35536.4 (SEQ ID NOs: 11 and 438), or a modified or unmodified variant thereof.

[2248] A RNAi agent comprising a first and a second strand, wherein the sequences of the first and/or second strands are the sequences of the first and/or second strands of: AD-35542.4 (SEQ ID NOs: 12 and 439), or a modified or unmodified variant thereof.

[2249] A RNAi agent comprising a first and a second strand, wherein the sequences of the first and/or second strands are the sequences of the first and/or second strands of: AD-35548.4 (SEQ ID NOs: 13 and 440), or a modified or unmodified variant thereof.

[2250] A RNAi agent comprising a first and a second strand, wherein the sequences of the first and/or second strands are the sequences of the first and/or second strands of: AD-35554.4 (SEQ ID NOs: 14 and 441), or a modified or unmodified variant thereof.

[2251] A RNAi agent comprising a first and a second strand, wherein the sequences of the first and/or second strands are the sequences of the first and/or second strands of: AD-35560.2 (SEQ ID NOs: 15 and 442), or a modified or unmodified variant thereof.

[2252] A RNAi agent comprising a first and a second strand, wherein the sequences of the first and/or second strands are the sequences of the first and/or second strands of: AD-35566.4 (SEQ ID NOs: 16 and 443), or a modified or unmodified variant thereof.

[2253] A RNAi agent comprising a first and a second strand, wherein the sequences of the first and/or second strands are the sequences of the first and/or second strands of: AD-35525.2 (SEQ ID NOs: 17 and 444), or a modified or unmodified variant thereof.

[2254] A RNAi agent comprising a first and a second strand, wherein the sequences of the first and/or second strands are the sequences of the first and/or second strands of: AD-35531.4 (SEQ ID NOs: 18 and 445), or a modified or unmodified variant thereof.

[2255] A RNAi agent comprising a first and a second strand, wherein the sequences of the first and/or second strands are the sequences of the first and/or second strands of: AD-35537.4 (SEQ ID NOs: 19 and 446), or a modified or unmodified variant thereof.

[2256] A RNAi agent comprising a first and a second strand, wherein the sequences of the first and/or second strands are the sequences of the first and/or second strands of: AD-35543.2 (SEQ ID NOs: 20 and 447), or a modified or unmodified variant thereof.

[2257] A RNAi agent comprising a first and a second strand, wherein the sequences of the first and/or second strands are the sequences of the first and/or second strands of: AD-35549.4 (SEQ ID NOs: 21 and 448), or a modified or unmodified variant thereof.

[2258] A RNAi agent comprising a first and a second strand, wherein the sequences of the first and/or second strands are the sequences of the first and/or second strands of: AD-35555.4 (SEQ ID NOs: 22 and 449), or a modified or unmodified variant thereof.

[2259] A RNAi agent comprising a first and a second strand, wherein the sequences of the first and/or second strands are the sequences of the first and/or second strands of: AD-35561.4 (SEQ ID NOs: 23 and 450), or a modified or unmodified variant thereof.

[2260] A RNAi agent comprising a first and a second strand, wherein the sequences of the first and/or second strands are the sequences of the first and/or second strands of: AD-35567.4 (SEQ ID NOs: 24 and 451), or a modified or unmodified variant thereof.

[2261] A RNAi agent comprising a first and a second strand, wherein the sequences of the first and/or second strands are the sequences of the first and/or second strands of: AD-35526.4 (SEQ ID NOs: 25 and 452), or a modified or unmodified variant thereof.

[2262] A RNAi agent comprising a first and a second strand, wherein the sequences of the first and/or second strands are the sequences of the first and/or second strands of: AD-35532.4 (SEQ ID NOs: 26 and 453), or a modified or unmodified variant thereof.

[2263] A RNAi agent comprising a first and a second strand, wherein the sequences of the first and/or second strands are the sequences of the first and/or second strands of: AD-35538.4 (SEQ ID NOs: 27 and 454), or a modified or unmodified variant thereof.

[2264] A RNAi agent comprising a first and a second strand, wherein the sequences of the first and/or second strands are the sequences of the first and/or second strands of: AD-35544.4 (SEQ ID NOs: 28 and 455), or a modified or unmodified variant thereof.

[2265] A RNAi agent comprising a first and a second strand, wherein the sequences of the first and/or second strands are the sequences of the first and/or second strands of: AD-35550.4 (SEQ ID NOs: 29 and 456), or a modified or unmodified variant thereof.

[2266] A RNAi agent comprising a first and a second strand, wherein the sequences of the first and/or second strands are the sequences of the first and/or second strands of: AD-35556.4 (SEQ ID NOs: 30 and 457), or a modified or unmodified variant thereof.

[2267] A RNAi agent comprising a first and a second strand, wherein the sequences of the first and/or second strands are the sequences of the first and/or second strands of: AD-35562.4 (SEQ ID NOs: 31 and 458), or a modified or unmodified variant thereof.

[2268] A RNAi agent comprising a first and a second strand, wherein the sequences of the first and/or second strands are the sequences of the first and/or second strands of: AD-35568.4 (SEQ ID NOs: 32 and 459), or a modified or unmodified variant thereof.

[2269] A RNAi agent comprising a first and a second strand, wherein the sequences of the first and/or second strands are the sequences of the first and/or second strands of: AD-35527.4 (SEQ ID NOs: 33 and 460), or a modified or unmodified variant thereof.

[2270] A RNAi agent comprising a first and a second strand, wherein the sequences of the first and/or second strands are the sequences of the first and/or second strands of: AD-35533.4 (SEQ ID NOs: 34 and 461), or a modified or unmodified variant thereof.

[2271] A RNAi agent comprising a first and a second strand, wherein the sequences of the first and/or second strands are the sequences of the first and/or second strands of: AD-35539.4 (SEQ ID NOs: 35 and 462), or a modified or unmodified variant thereof.

[2272] A RNAi agent comprising a first and a second strand, wherein the sequences of the first and/or second strands are the sequences of the first and/or second strands of: AD-35545.4 (SEQ ID NOs: 36 and 463), or a modified or unmodified variant thereof.

[2273] A RNAi agent comprising a first and a second strand, wherein the sequences of the first and/or second strands are the sequences of the first and/or second strands of: AD-35551.4 (SEQ ID NOs: 37 and 464), or a modified or unmodified variant thereof.

[2274] A RNAi agent comprising a first and a second strand, wherein the sequences of the first and/or second strands are the sequences of the first and/or second strands of: AD-35563.4 (SEQ ID NOs: 38 and 465), or a modified or unmodified variant thereof.

[2275] A RNAi agent comprising a first and a second strand, wherein the sequences of the first and/or second strands are the sequences of the first and/or second strands of: AD-35528.4 (SEQ ID NOs: 39 and 466), or a modified or unmodified variant thereof.

[2276] A RNAi agent comprising a first and a second strand, wherein the sequences of the first and/or second strands are the sequences of the first and/or second strands of: AD-35540.4 (SEQ ID NOs: 40 and 467), or a modified or unmodified variant thereof.

[2277] A RNAi agent comprising a first and a second strand, wherein the sequences of the first and/or second strands are the sequences of the first and/or second strands of: AD-35546.4 (SEQ ID NOs: 41 and 468), or a modified or unmodified variant thereof.

[2278] A RNAi agent comprising a first and a second strand, wherein the sequences of the first and/or second strands are the sequences of the first and/or second strands of: AD-35552.4 (SEQ ID NOs: 42 and 469), or a modified or unmodified variant thereof.

[2279] A RNAi agent comprising a first and a second strand, wherein the sequences of the first and/or second strands are the sequences of the first and/or second strands of: AD-35558.4 (SEQ ID NOs: 43 and 470), or a modified or unmodified variant thereof.

[2280] A RNAi agent comprising a first and a second strand, wherein the sequences of the first and/or second strands are the sequences of the first and/or second strands of: AD-35564.4 (SEQ ID NOs: 44 and 471), or a modified or unmodified variant thereof.

[2281] A RNAi agent comprising a first and a second strand, wherein the sequences of the first and/or second strands are the sequences of the first and/or second strands of: AD-35570.4 (SEQ ID NOs: 45 and 472), or a modified or unmodified variant thereof.

[2282] A RNAi agent comprising a first and a second strand, wherein the sequences of the first and/or second strands are the sequences of the first and/or second strands of: AD-35571.4 (SEQ ID NOs: 46 and 473), or a modified or unmodified variant thereof.

[2283] A RNAi agent comprising a first and a second strand, wherein the sequences of the first and/or second strands are the sequences of the first and/or second strands of: AD-35577.4 (SEQ ID NOs: 47 and 474), or a modified or unmodified variant thereof.

[2284] A RNAi agent comprising a first and a second strand, wherein the sequences of the first and/or second strands are the sequences of the first and/or second strands of: AD-35583.4 (SEQ ID NOs: 48 and 475), or a modified or unmodified variant thereof.

[2285] A RNAi agent comprising a first and a second strand, wherein the sequences of the first and/or second strands are the sequences of the first and/or second strands of: AD-35589.4 (SEQ ID NOs: 49 and 476), or a modified or unmodified variant thereof.

[2286] A RNAi agent comprising a first and a second strand, wherein the sequences of the first and/or second strands are the sequences of the first and/or second strands of: AD-35595.4 (SEQ ID NOs: 50 and 477), or a modified or unmodified variant thereof.

[2287] A RNAi agent comprising a first and a second strand, wherein the sequences of the first and/or second strands are the sequences of the first and/or second strands of: AD-35601.4 (SEQ ID NOs: 51 and 478), or a modified or unmodified variant thereof.

[2288] A RNAi agent comprising a first and a second strand, wherein the sequences of the first and/or second strands are the sequences of the first and/or second strands of: AD-35607.4 (SEQ ID NOs: 52 and 479), or a modified or unmodified variant thereof.

[2289] A RNAi agent comprising a first and a second strand, wherein the sequences of the first and/or second strands are the sequences of the first and/or second strands of: AD-35613.4 (SEQ ID NOs: 53 and 480), or a modified or unmodified variant thereof.

[2290] A RNAi agent comprising a first and a second strand, wherein the sequences of the first and/or second strands are the sequences of the first and/or second strands of: AD-35572.4 (SEQ ID NOs: 54 and 481), or a modified or unmodified variant thereof.

[2291] A RNAi agent comprising a first and a second strand, wherein the sequences of the first and/or second strands are the sequences of the first and/or second strands of: AD-35578.4 (SEQ ID NOs: 55 and 482), or a modified or unmodified variant thereof.

[2292] A RNAi agent comprising a first and a second strand, wherein the sequences of the first and/or second strands are the sequences of the first and/or second strands of: AD-35584.4 (SEQ ID NOs: 56 and 483), or a modified or unmodified variant thereof.

[2293] A RNAi agent comprising a first and a second strand, wherein the sequences of the first and/or second strands are the sequences of the first and/or second strands of: AD-35590.4 (SEQ ID NOs: 57 and 484), or a modified or unmodified variant thereof.

[2294] A RNAi agent comprising a first and a second strand, wherein the sequences of the first and/or second strands are the sequences of the first and/or second strands of: AD-35596.4 (SEQ ID NOs: 58 and 485), or a modified or unmodified variant thereof.

[2295] A RNAi agent comprising a first and a second strand, wherein the sequences of the first and/or second strands are the sequences of the first and/or second strands of: AD-35602.4 (SEQ ID NOs: 59 and 486), or a modified or unmodified variant thereof.

[2296] A RNAi agent comprising a first and a second strand, wherein the sequences of the first and/or second strands are the sequences of the first and/or second strands of: AD-35608.4 (SEQ ID NOs: 60 and 487), or a modified or unmodified variant thereof.

[2297] A RNAi agent comprising a first and a second strand, wherein the sequences of the first and/or second strands are the sequences of the first and/or second strands of: AD-35614.4 (SEQ ID NOs: 61 and 488), or a modified or unmodified variant thereof.

[2298] A RNAi agent comprising a first and a second strand, wherein the sequences of the first and/or second strands are the sequences of the first and/or second strands of: AD-35573.4 (SEQ ID NOs: 62 and 489), or a modified or unmodified variant thereof.

[2299] A RNAi agent comprising a first and a second strand, wherein the sequences of the first and/or second strands are the sequences of the first and/or second strands of: AD-35579.4 (SEQ ID NOs: 63 and 490), or a modified or unmodified variant thereof.

[2300] A RNAi agent comprising a first and a second strand, wherein the sequences of the first and/or second strands are the sequences of the first and/or second strands of: AD-35585.4 (SEQ ID NOs: 64 and 491), or a modified or unmodified variant thereof.

[2301] A RNAi agent comprising a first and a second strand, wherein the sequences of the first and/or second strands are the sequences of the first and/or second strands of: AD-35591.4 (SEQ ID NOs: 65 and 492), or a modified or unmodified variant thereof.

[2302] A RNAi agent comprising a first and a second strand, wherein the sequences of the first and/or second strands are the sequences of the first and/or second strands of: AD-35597.4 (SEQ ID NOs: 66 and 493), or a modified or unmodified variant thereof.

[2303] A RNAi agent comprising a first and a second strand, wherein the sequences of the first and/or second strands are the sequences of the first and/or second strands of: AD-35603.4 (SEQ ID NOs: 67 and 494), or a modified or unmodified variant thereof.

[2304] A RNAi agent comprising a first and a second strand, wherein the sequences of the first and/or second strands are the sequences of the first and/or second strands of: AD-35609.4 (SEQ ID NOs: 68 and 495), or a modified or unmodified variant thereof.

[2305] A RNAi agent comprising a first and a second strand, wherein the sequences of the first and/or second strands are the sequences of the first and/or second strands of: AD-35615.4 (SEQ ID NOs: 69 and 496), or a modified or unmodified variant thereof.

[2306] A RNAi agent comprising a first and a second strand, wherein the sequences of the first and/or second strands are the sequences of the first and/or second strands of: AD-35574.4 (SEQ ID NOs: 70 and 497), or a modified or unmodified variant thereof.

[2307] A RNAi agent comprising a first and a second strand, wherein the sequences of the first and/or second strands are the sequences of the first and/or second strands of: AD-35580.1 (SEQ ID NOs: 71 and 498), or a modified or unmodified variant thereof.

[2308] A RNAi agent comprising a first and a second strand, wherein the sequences of the first and/or second strands are the sequences of the first and/or second strands of: AD-35586.4 (SEQ ID NOs: 72 and 499), or a modified or unmodified variant thereof.

[2309] A RNAi agent comprising a first and a second strand, wherein the sequences of the first and/or second strands are the sequences of the first and/or second strands of: AD-35592.4 (SEQ ID NOs: 73 and 500), or a modified or unmodified variant thereof.

[2310] A RNAi agent comprising a first and a second strand, wherein the sequences of the first and/or second strands are the sequences of the first and/or second strands of: AD-35598.4 (SEQ ID NOs: 74 and 501), or a modified or unmodified variant thereof.

[2311] A RNAi agent comprising a first and a second strand, wherein the sequences of the first and/or second strands are the sequences of the first and/or second strands of: AD-35604.4 (SEQ ID NOs: 75 and 502), or a modified or unmodified variant thereof.

[2312] A RNAi agent comprising a first and a second strand, wherein the sequences of the first and/or second strands are the sequences of the first and/or second strands of: AD-35610.4 (SEQ ID NOs: 76 and 503), or a modified or unmodified variant thereof.

[2313] A RNAi agent comprising a first and a second strand, wherein the sequences of the first and/or second strands are the sequences of the first and/or second strands of: AD-35616.4 (SEQ ID NOs: 77 and 504), or a modified or unmodified variant thereof.

[2314] A RNAi agent comprising a first and a second strand, wherein the sequences of the first and/or second strands are the sequences of the first and/or second strands of: AD-35575.4 (SEQ ID NOs: 78 and 505), or a modified or unmodified variant thereof.

[2315] A RNAi agent comprising a first and a second strand, wherein the sequences of the first and/or second strands are the sequences of the first and/or second strands of: AD-35581.4 (SEQ ID NOs: 79 and 506), or a modified or unmodified variant thereof.

[2316] A RNAi agent comprising a first and a second strand, wherein the sequences of the first and/or second strands are the sequences of the first and/or second strands of: AD-35587.4 (SEQ ID NOs: 80 and 507), or a modified or unmodified variant thereof.

[2317] A RNAi agent comprising a first and a second strand, wherein the sequences of the first and/or second strands are the sequences of the first and/or second strands of: AD-35593.4 (SEQ ID NOs: 81 and 508), or a modified or unmodified variant thereof.

[2318] A RNAi agent comprising a first and a second strand, wherein the sequences of the first and/or second strands are the sequences of the first and/or second strands of: AD-35599.4 (SEQ ID NOs: 82 and 509), or a modified or unmodified variant thereof.

[2319] A RNAi agent comprising a first and a second strand, wherein the sequences of the first and/or second strands are the sequences of the first and/or second strands of: AD-35605.4 (SEQ ID NOs: 83 and 510), or a modified or unmodified variant thereof.

[2320] A RNAi agent comprising a first and a second strand, wherein the sequences of the first and/or second strands are the sequences of the first and/or second strands of: AD-35611.4 (SEQ ID NOs: 84 and 511), or a modified or unmodified variant thereof.

[2321] A RNAi agent comprising a first and a second strand, wherein the sequences of the first and/or second strands are the sequences of the first and/or second strands of: AD-35617.4 (SEQ ID NOs: 85 and 512), or a modified or unmodified variant thereof.

[2322] A RNAi agent comprising a first and a second strand, wherein the sequences of the first and/or second strands are the sequences of the first and/or second strands of: AD-35576.4 (SEQ ID NOs: 86 and 513), or a modified or unmodified variant thereof.

[2323] A RNAi agent comprising a first and a second strand, wherein the sequences of the first and/or second strands are the sequences of the first and/or second strands of: AD-35588.4 (SEQ ID NOs: 87 and 514), or a modified or unmodified variant thereof.

[2324] A RNAi agent comprising a first and a second strand, wherein the sequences of the first and/or second strands are the sequences of the first and/or second strands of: AD-35667.1 (SEQ ID NOs: 88 and 515), or a modified or unmodified variant thereof.

[2325] A RNAi agent comprising a first and a second strand, wherein the sequences of the first and/or second strands are the sequences of the first and/or second strands of: AD-35673.1 (SEQ ID NOs: 89 and 516), or a modified or unmodified variant thereof.

[2326] A RNAi agent comprising a first and a second strand, wherein the sequences of the first and/or second strands are the sequences of the first and/or second strands of: AD-35679.1 (SEQ ID NOs: 90 and 517), or a modified or unmodified variant thereof.

[2327] A RNAi agent comprising a first and a second strand, wherein the sequences of the first and/or second strands are the sequences of the first and/or second strands of: AD-35685.1 (SEQ ID NOs: 91 and 518), or a modified or unmodified variant thereof.

[2328] A RNAi agent comprising a first and a second strand, wherein the sequences of the first and/or second strands are the sequences of the first and/or second strands of: AD-35691.1 (SEQ ID NOs: 92 and 519), or a modified or unmodified variant thereof.

[2329] A RNAi agent comprising a first and a second strand, wherein the sequences of the first and/or second strands are the sequences of the first and/or second strands of: AD-35557.1 (SEQ ID NOs: 93 and 520), or a modified or unmodified variant thereof.

[2330] A RNAi agent comprising a first and a second strand, wherein the sequences of the first and/or second strands are the sequences of the first and/or second strands of: AD-35618.1 (SEQ ID NOs: 94 and 521), or a modified or unmodified variant thereof.

[2331] A RNAi agent comprising a first and a second strand, wherein the sequences of the first and/or second strands are the sequences of the first and/or second strands of: AD-35569.1 (SEQ ID NOs: 95 and 522), or a modified or unmodified variant thereof.

[2332] A RNAi agent comprising a first and a second strand, wherein the sequences of the first and/or second strands are the sequences of the first and/or second strands of: AD-35534.1 (SEQ ID NOs: 96 and 523), or a modified or unmodified variant thereof.

[2333] A RNAi agent comprising a first and a second strand, wherein the sequences of the first and/or second strands are the sequences of the first and/or second strands of: AD-35582.1 (SEQ ID NOs: 97 and 524), or a modified or unmodified variant thereof.

[2334] A RNAi agent comprising a first and a second strand, wherein the sequences of the first and/or second strands are the sequences of the first and/or second strands of: AD-35594.1 (SEQ ID NOs: 98 and 525), or a modified or unmodified variant thereof.

[2335] A RNAi agent comprising a first and a second strand, wherein the sequences of the first and/or second strands are the sequences of the first and/or second strands of: AD-35600.1 (SEQ ID NOs: 99 and 526), or a modified or unmodified variant thereof.

[2336] A RNAi agent comprising a first and a second strand, wherein the sequences of the first and/or second strands are the sequences of the first and/or second strands of: AD-35606.1 (SEQ ID NOs: 100 and 527), or a modified or unmodified variant thereof.

[2337] A RNAi agent comprising a first and a second strand, wherein the sequences of the first and/or second strands are the sequences of the first and/or second strands of: AD-35612.1 (SEQ ID NOs: 101 and 528), or a modified or unmodified variant thereof.

[2338] A RNAi agent comprising a first and a second strand, wherein the sequences of the first and/or second strands are the sequences of the first and/or second strands of: AD-38127.1 (SEQ ID NOs: 102 and 529), or a modified or unmodified variant thereof.

[2339] A RNAi agent comprising a first and a second strand, wherein the sequences of the first and/or second strands are the sequences of the first and/or second strands of: AD-38133.1 (SEQ ID NOs: 103 and 530), or a modified or unmodified variant thereof.

[2340] A RNAi agent comprising a first and a second strand, wherein the sequences of the first and/or second strands are the sequences of the first and/or second strands of: AD-38139.1 (SEQ ID NOs: 104 and 531), or a modified or unmodified variant thereof.

[2341] A RNAi agent comprising a first and a second strand, wherein the sequences of the first and/or second strands are the sequences of the first and/or second strands of: AD-38145.1 (SEQ ID NOs: 105 and 532), or a modified or unmodified variant thereof.

[2342] A RNAi agent comprising a first and a second strand, wherein the sequences of the first and/or second strands are the sequences of the first and/or second strands of: AD-38151.1 (SEQ ID NOs: 106 and 533), or a modified or unmodified variant thereof.

[2343] A RNAi agent comprising a first and a second strand, wherein the sequences of the first and/or second strands are the sequences of the first and/or second strands of: AD-38157.1 (SEQ ID NOs: 107 and 534), or a modified or unmodified variant thereof.

[2344] A RNAi agent comprising a first and a second strand, wherein the sequences of the first and/or second strands are the sequences of the first and/or second strands of: AD-38163.1 (SEQ ID NOs: 108 and 535), or a modified or unmodified variant thereof.

[2345] A RNAi agent comprising a first and a second strand, wherein the sequences of the first and/or second strands are the sequences of the first and/or second strands of: AD-38169.1 (SEQ ID NOs: 109 and 536), or a modified or unmodified variant thereof.

[2346] A RNAi agent comprising a first and a second strand, wherein the sequences of the first and/or second strands are the sequences of the first and/or second strands of: AD-38128.1 (SEQ ID NOs: 110 and 537), or a modified or unmodified variant thereof.

[2347] A RNAi agent comprising a first and a second strand, wherein the sequences of the first and/or second strands are the sequences of the first and/or second strands of: AD-38134.1 (SEQ ID NOs: 111 and 538), or a modified or unmodified variant thereof.

[2348] A RNAi agent comprising a first and a second strand, wherein the sequences of the first and/or second strands are the sequences of the first and/or second strands of: AD-38140.1 (SEQ ID NOs: 112 and 539), or a modified or unmodified variant thereof.

[2349] A RNAi agent comprising a first and a second strand, wherein the sequences of the first and/or second strands are the sequences of the first and/or second strands of: AD-38146.1 (SEQ ID NOs: 113 and 540), or a modified or unmodified variant thereof.

[2350] A RNAi agent comprising a first and a second strand, wherein the sequences of the first and/or second strands are the sequences of the first and/or second strands of: AD-38152.1 (SEQ ID NOs: 114 and 541), or a modified or unmodified variant thereof.

[2351] A RNAi agent comprising a first and a second strand, wherein the sequences of the first and/or second strands are the sequences of the first and/or second strands of: AD-38158.1 (SEQ ID NOs: 115 and 542), or a modified or unmodified variant thereof.

[2352] A RNAi agent comprising a first and a second strand, wherein the sequences of the first and/or second strands are the sequences of the first and/or second strands of: AD-38164.1 (SEQ ID NOs: 116 and 543), or a modified or unmodified variant thereof.

[2353] A RNAi agent comprising a first and a second strand, wherein the sequences of the first and/or second strands are the sequences of the first and/or second strands of: AD-38170.1 (SEQ ID NOs: 117 and 544), or a modified or unmodified variant thereof.

[2354] A RNAi agent comprising a first and a second strand, wherein the sequences of the first and/or second strands are the sequences of the first and/or second strands of: AD-38129.1 (SEQ ID NOs: 118 and 545), or a modified or unmodified variant thereof.

[2355] A RNAi agent comprising a first and a second strand, wherein the sequences of the first and/or second strands are the sequences of the first and/or second strands of: AD-38135.1 (SEQ ID NOs: 119 and 546), or a modified or unmodified variant thereof.

[2356] A RNAi agent comprising a first and a second strand, wherein the sequences of the first and/or second strands are the sequences of the first and/or second strands of: AD-38141.1 (SEQ ID NOs: 120 and 547), or a modified or unmodified variant thereof.

[2357] A RNAi agent comprising a first and a second strand, wherein the sequences of the first and/or second strands are the sequences of the first and/or second strands of: AD-38147.1 (SEQ ID NOs: 121 and 548), or a modified or unmodified variant thereof.

[2358] A RNAi agent comprising a first and a second strand, wherein the sequences of the first and/or second strands are the sequences of the first and/or second strands of: AD-38153.1 (SEQ ID NOs: 122 and 549), or a modified or unmodified variant thereof.

[2359] A RNAi agent comprising a first and a second strand, wherein the sequences of the first and/or second strands are the sequences of the first and/or second strands of: AD-38159.1 (SEQ ID NOs: 123 and 550), or a modified or unmodified variant thereof.

[2360] A RNAi agent comprising a first and a second strand, wherein the sequences of the first and/or second strands are the sequences of the first and/or second strands of: AD-38165.1 (SEQ ID NOs: 124 and 551), or a modified or unmodified variant thereof.

[2361] A RNAi agent comprising a first and a second strand, wherein the sequences of the first and/or second strands are the sequences of the first and/or second strands of: AD-38171.1 (SEQ ID NOs: 125 and 552), or a modified or unmodified variant thereof.

[2362] A RNAi agent comprising a first and a second strand, wherein the sequences of the first and/or second strands are the sequences of the first and/or second strands of: AD-38130.1 (SEQ ID NOs: 126 and 553), or a modified or unmodified variant thereof.

[2363] A RNAi agent comprising a first and a second strand, wherein the sequences of the first and/or second strands are the sequences of the first and/or second strands of: AD-38136.1 (SEQ ID NOs: 127 and 554), or a modified or unmodified variant thereof.

[2364] A RNAi agent comprising a first and a second strand, wherein the sequences of the first and/or second strands are the sequences of the first and/or second strands of: AD-38142.1 (SEQ ID NOs: 128 and 555), or a modified or unmodified variant thereof.

[2365] A RNAi agent comprising a first and a second strand, wherein the sequences of the first and/or second strands are the sequences of the first and/or second strands of: AD-38148.1 (SEQ ID NOs: 129 and 556), or a modified or unmodified variant thereof.

[2366] A RNAi agent comprising a first and a second strand, wherein the sequences of the first and/or second strands are the sequences of the first and/or second strands of: AD-38154.1 (SEQ ID NOs: 130 and 557), or a modified or unmodified variant thereof.

[2367] A RNAi agent comprising a first and a second strand, wherein the sequences of the first and/or second strands are the sequences of the first and/or second strands of: AD-38160.1 (SEQ ID NOs: 131 and 558), or a modified or unmodified variant thereof.

[2368] A RNAi agent comprising a first and a second strand, wherein the sequences of the first and/or second strands are the sequences of the first and/or second strands of: AD-38166.1 (SEQ ID NOs: 132 and 559), or a modified or unmodified variant thereof.

[2369] A RNAi agent comprising a first and a second strand, wherein the sequences of the first and/or second strands are the sequences of the first and/or second strands of: AD-38172.1 (SEQ ID NOs: 133 and 560), or a modified or unmodified variant thereof.

[2370] A RNAi agent comprising a first and a second strand, wherein the sequences of the first and/or second strands are the sequences of the first and/or second strands of: AD-38131.1 (SEQ ID NOs: 134 and 561), or a modified or unmodified variant thereof.

[2371] A RNAi agent comprising a first and a second strand, wherein the sequences of the first and/or second strands are the sequences of the first and/or second strands of: AD-38137.1 (SEQ ID NOs: 135 and 562), or a modified or unmodified variant thereof.

[2372] A RNAi agent comprising a first and a second strand, wherein the sequences of the first and/or second strands are the sequences of the first and/or second strands of: AD-38143.1 (SEQ ID NOs: 136 and 563), or a modified or unmodified variant thereof.

[2373] A RNAi agent comprising a first and a second strand, wherein the sequences of the first and/or second strands are the sequences of the first and/or second strands of: AD-38149.1 (SEQ ID NOs: 137 and 564), or a modified or unmodified variant thereof.

[2374] A RNAi agent comprising a first and a second strand, wherein the sequences of the first and/or second strands are the sequences of the first and/or second strands of: AD-38155.1 (SEQ ID NOs: 138 and 565), or a modified or unmodified variant thereof.

[2375] A RNAi agent comprising a first and a second strand, wherein the sequences of the first and/or second strands are the sequences of the first and/or second strands of: AD-38161.1 (SEQ ID NOs: 139 and 566), or a modified or unmodified variant thereof.

[2376] A RNAi agent comprising a first and a second strand, wherein the sequences of the first and/or second strands are the sequences of the first and/or second strands of: AD-38167.1 (SEQ ID NOs: 140 and 567), or a modified or unmodified variant thereof.

[2377] A RNAi agent comprising a first and a second strand, wherein the sequences of the first and/or second strands are the sequences of the first and/or second strands of: AD-38173.1 (SEQ ID NOs: 141 and 568), or a modified or unmodified variant thereof.

[2378] A RNAi agent comprising a first and a second strand, wherein the sequences of the first and/or second strands are the sequences of the first and/or second strands of: AD-38132.1 (SEQ ID NOs: 142 and 569), or a modified or unmodified variant thereof.

[2379] A RNAi agent comprising a first and a second strand, wherein the sequences of the first and/or second strands are the sequences of the first and/or second strands of: AD-38138.1 (SEQ ID NOs: 143 and 570), or a modified or unmodified variant thereof.

[2380] A RNAi agent comprising a first and a second strand, wherein the sequences of the first and/or second strands are the sequences of the first and/or second strands of: AD-38144.1 (SEQ ID NOs: 144 and 571), or a modified or unmodified variant thereof.

[2381] A RNAi agent comprising a first and a second strand, wherein the sequences of the first and/or second strands are the sequences of the first and/or second strands of: AD-38150.1 (SEQ ID NOs: 145 and 572), or a modified or unmodified variant thereof.

[2382] A RNAi agent comprising a first and a second strand, wherein the sequences of the first and/or second strands are the sequences of the first and/or second strands of: AD-38156.1 (SEQ ID NOs: 146 and 573), or a modified or unmodified variant thereof.

[2383] A RNAi agent comprising a first and a second strand, wherein the sequences of the first and/or second strands are the sequences of the first and/or second strands of: AD-38162.1 (SEQ ID NOs: 147 and 574), or a modified or unmodified variant thereof.

[2384] A RNAi agent comprising a first and a second strand, wherein the sequences of the first and/or second strands are the sequences of the first and/or second strands of: AD-38168.1 (SEQ ID NOs: 148 and 575), or a modified or unmodified variant thereof.

[2385] A RNAi agent comprising a first and a second strand, wherein the sequences of the first and/or second strands are the sequences of the first and/or second strands of: AD-38174.1 (SEQ ID NOs: 149 and 576), or a modified or unmodified variant thereof.

[2386] A RNAi agent comprising a first and a second strand, wherein the sequences of the first and/or second strands are the sequences of the first and/or second strands of: AD-39683.1 (SEQ ID NOs: 150 and 577), or a modified or unmodified variant thereof.

[2387] A RNAi agent comprising a first and a second strand, wherein the sequences of the first and/or second strands are the sequences of the first and/or second strands of: AD-39689.1 (SEQ ID NOs: 151 and 578), or a modified or unmodified variant thereof.

[2388] A RNAi agent comprising a first and a second strand, wherein the sequences of the first and/or second strands are the sequences of the first and/or second strands of: AD-39695.1 (SEQ ID NOs: 152 and 579), or a modified or unmodified variant thereof.

[2389] A RNAi agent comprising a first and a second strand, wherein the sequences of the first and/or second strands are the sequences of the first and/or second strands of: AD-39701.1 (SEQ ID NOs: 153 and 580), or a modified or unmodified variant thereof.

[2390] A RNAi agent comprising a first and a second strand, wherein the sequences of the first and/or second strands are the sequences of the first and/or second strands of: AD-39707.1 (SEQ ID NOs: 154 and 581), or a modified or unmodified variant thereof.

[2391] A RNAi agent comprising a first and a second strand, wherein the sequences of the first and/or second strands are the sequences of the first and/or second strands of: AD-39713.1 (SEQ ID NOs: 155 and 582), or a modified or unmodified variant thereof.

[2392] A RNAi agent comprising a first and a second strand, wherein the sequences of the first and/or second strands are the sequences of the first and/or second strands of: AD-39719.1 (SEQ ID NOs: 156 and 583), or a modified or unmodified variant thereof.

[2393] A RNAi agent comprising a first and a second strand, wherein the sequences of the first and/or second strands are the sequences of the first and/or second strands of: AD-39725.1 (SEQ ID NOs: 157 and 584), or a modified or unmodified variant thereof.

[2394] A RNAi agent comprising a first and a second strand, wherein the sequences of the first and/or second strands are the sequences of the first and/or second strands of: AD-39684.1 (SEQ ID NOs: 158 and 585), or a modified or unmodified variant thereof.

[2395] A RNAi agent comprising a first and a second strand, wherein the sequences of the first and/or second strands are the sequences of the first and/or second strands of: AD-39690.1 (SEQ ID NOs: 159 and 586), or a modified or unmodified variant thereof.

[2396] A RNAi agent comprising a first and a second strand, wherein the sequences of the first and/or second strands are the sequences of the first and/or second strands of: AD-39696.1 (SEQ ID NOs: 160 and 587), or a modified or unmodified variant thereof.

[2397] A RNAi agent comprising a first and a second strand, wherein the sequences of the first and/or second strands are the sequences of the first and/or second strands of: AD-39702.1 (SEQ ID NOs: 161 and 588), or a modified or unmodified variant thereof.

[2398] A RNAi agent comprising a first and a second strand, wherein the sequences of the first and/or second strands are the sequences of the first and/or second strands of: AD-39708.1 (SEQ ID NOs: 162 and 589), or a modified or unmodified variant thereof.

[2399] A RNAi agent comprising a first and a second strand, wherein the sequences of the first and/or second strands are the sequences of the first and/or second strands of: AD-39714.1 (SEQ ID NOs: 163 and 590), or a modified or unmodified variant thereof.

[2400] A RNAi agent comprising a first and a second strand, wherein the sequences of the first and/or second strands are the sequences of the first and/or second strands of: AD-39720.1 (SEQ ID NOs: 164 and 591), or a modified or unmodified variant thereof.

[2401] A RNAi agent comprising a first and a second strand, wherein the sequences of the first and/or second strands are the sequences of the first and/or second strands of: AD-39726.1 (SEQ ID NOs: 165 and 592), or a modified or unmodified variant thereof.

[2402] A RNAi agent comprising a first and a second strand, wherein the sequences of the first and/or second strands are the sequences of the first and/or second strands of: AD-39685.1 (SEQ ID NOs: 166 and 593), or a modified or unmodified variant thereof.

[2403] A RNAi agent comprising a first and a second strand, wherein the sequences of the first and/or second strands are the sequences of the first and/or second strands of: AD-39691.1 (SEQ ID NOs: 167 and 594), or a modified or unmodified variant thereof.

[2404] A RNAi agent comprising a first and a second strand, wherein the sequences of the first and/or second strands are the sequences of the first and/or second strands of: AD-39697.1 (SEQ ID NOs: 168 and 595), or a modified or unmodified variant thereof.

[2405] A RNAi agent comprising a first and a second strand, wherein the sequences of the first and/or second strands are the sequences of the first and/or second strands of: AD-39703.1 (SEQ ID NOs: 169 and 596), or a modified or unmodified variant thereof.

[2406] A RNAi agent comprising a first and a second strand, wherein the sequences of the first and/or second strands are the sequences of the first and/or second strands of: AD-39709.1 (SEQ ID NOs: 170 and 597), or a modified or unmodified variant thereof.

[2407] A RNAi agent comprising a first and a second strand, wherein the sequences of the first and/or second strands are the sequences of the first and/or second strands of: AD-39715.1 (SEQ ID NOs: 171 and 598), or a modified or unmodified variant thereof.

[2408] A RNAi agent comprising a first and a second strand, wherein the sequences of the first and/or second strands are the sequences of the first and/or second strands of: AD-39721.1 (SEQ ID NOs: 172 and 599), or a modified or unmodified variant thereof.

[2409] A RNAi agent comprising a first and a second strand, wherein the sequences of the first and/or second strands are the sequences of the first and/or second strands of: AD-39727.1 (SEQ ID NOs: 173 and 600), or a modified or unmodified variant thereof.

[2410] A RNAi agent comprising a first and a second strand, wherein the sequences of the first and/or second strands are the sequences of the first and/or second strands of: AD-39686.1 (SEQ ID NOs: 174 and 601), or a modified or unmodified variant thereof.

[2411] A RNAi agent comprising a first and a second strand, wherein the sequences of the first and/or second strands are the sequences of the first and/or second strands of: AD-39692.1 (SEQ ID NOs: 175 and 602), or a modified or unmodified variant thereof.

[2412] A RNAi agent comprising a first and a second strand, wherein the sequences of the first and/or second strands are the sequences of the first and/or second strands of: AD-39698.1 (SEQ ID NOs: 176 and 603), or a modified or unmodified variant thereof.

[2413] A RNAi agent comprising a first and a second strand, wherein the sequences of the first and/or second strands are the sequences of the first and/or second strands of: AD-39704.1 (SEQ ID NOs: 177 and 604), or a modified or unmodified variant thereof.

[2414] A RNAi agent comprising a first and a second strand, wherein the sequences of the first and/or second strands are the sequences of the first and/or second strands of: AD-39710.1 (SEQ ID NOs: 178 and 605), or a modified or unmodified variant thereof.

[2415] A RNAi agent comprising a first and a second strand, wherein the sequences of the first and/or second strands are the sequences of the first and/or second strands of: AD-39716.1 (SEQ ID NOs: 179 and 606), or a modified or unmodified variant thereof.

[2416] A RNAi agent comprising a first and a second strand, wherein the sequences of the first and/or second strands are the sequences of the first and/or second strands of: AD-39722.1 (SEQ ID NOs: 180 and 607), or a modified or unmodified variant thereof.

[2417] A RNAi agent comprising a first and a second strand, wherein the sequences of the first and/or second strands are the sequences of the first and/or second strands of: AD-39728.1 (SEQ ID NOs: 181 and 608), or a modified or unmodified variant thereof.

[2418] A RNAi agent comprising a first and a second strand, wherein the sequences of the first and/or second strands are the sequences of the first and/or second strands of: AD-39687.1 (SEQ ID NOs: 182 and 609), or a modified or unmodified variant thereof.

[2419] A RNAi agent comprising a first and a second strand, wherein the sequences of the first and/or second strands are the sequences of the first and/or second strands of: AD-39693.1 (SEQ ID NOs: 183 and 610), or a modified or unmodified variant thereof.

[2420] A RNAi agent comprising a first and a second strand, wherein the sequences of the first and/or second strands are the sequences of the first and/or second strands of: AD-39699.1 (SEQ ID NOs: 184 and 611), or a modified or unmodified variant thereof.

[2421] A RNAi agent comprising a first and a second strand, wherein the sequences of the first and/or second strands are the sequences of the first and/or second strands of: AD-39705.1 (SEQ ID NOs: 185 and 612), or a modified or unmodified variant thereof.

[2422] A RNAi agent comprising a first and a second strand, wherein the sequences of the first and/or second strands are the sequences of the first and/or second strands of: AD-39711.1 (SEQ ID NOs: 186 and 613), or a modified or unmodified variant thereof.

[2423] A RNAi agent comprising a first and a second strand, wherein the sequences of the first and/or second strands are the sequences of the first and/or second strands of: AD-39717.1 (SEQ ID NOs: 187 and 614), or a modified or unmodified variant thereof.

[2424] A RNAi agent comprising a first and a second strand, wherein the sequences of the first and/or second strands are the sequences of the first and/or second strands of: AD-39723.1 (SEQ ID NOs: 188 and 615), or a modified or unmodified variant thereof.

[2425] A RNAi agent comprising a first and a second strand, wherein the sequences of the first and/or second strands are the sequences of the first and/or second strands of: AD-39729.1 (SEQ ID NOs: 189 and 616), or a modified or unmodified variant thereof.

[2426] A RNAi agent comprising a first and a second strand, wherein the sequences of the first and/or second strands are the sequences of the first and/or second strands of: AD-39688.1 (SEQ ID NOs: 190 and 617), or a modified or unmodified variant thereof.

[2427] A RNAi agent comprising a first and a second strand, wherein the sequences of the first and/or second strands are the sequences of the first and/or second strands of: AD-39694.1 (SEQ ID NOs: 191 and 618), or a modified or unmodified variant thereof.

[2428] A RNAi agent comprising a first and a second strand, wherein the sequences of the first and/or second strands are the sequences of the first and/or second strands of: AD-39700.1 (SEQ ID NOs: 192 and 619), or a modified or unmodified variant thereof.

[2429] A RNAi agent comprising a first and a second strand, wherein the sequences of the first and/or second strands are the sequences of the first and/or second strands of: AD-39706.1 (SEQ ID NOs: 193 and 620), or a modified or unmodified variant thereof.

[2430] A RNAi agent comprising a first and a second strand, wherein the sequences of the first and/or second strands are the sequences of the first and/or second strands of: AD-39712.1 (SEQ ID NOs: 194 and 621), or a modified or unmodified variant thereof.

[2431] A RNAi agent comprising a first and a second strand, wherein the sequences of the first and/or second strands are the sequences of the first and/or second strands of: AD-39718.1 (SEQ ID NOs: 195 and 622), or a modified or unmodified variant thereof.

[2432] A RNAi agent comprising a first and a second strand, wherein the sequences of the first and/or second strands are the sequences of the first and/or second strands of: AD-39724.1 (SEQ ID NOs: 196 and 623), or a modified or unmodified variant thereof.

[2433] A RNAi agent comprising a first and a second strand, wherein the sequences of the first and/or second strands are the sequences of the first and/or second strands of: AD-39730.1 (SEQ ID NOs: 197 and 624), or a modified or unmodified variant thereof.

[2434] A RNAi agent comprising a first and a second strand, wherein the sequences of the first and/or second strands are the sequences of the first and/or second strands of: AD-39736.1 (SEQ ID NOs: 198 and 625), or a modified or unmodified variant thereof.

[2435] A RNAi agent comprising a first and a second strand, wherein the sequences of the first and/or second strands are the sequences of the first and/or second strands of: AD-39742.1 (SEQ ID NOs: 199 and 626), or a modified or unmodified variant thereof.

[2436] A RNAi agent comprising a first and a second strand, wherein the sequences of the first and/or second strands are the sequences of the first and/or second strands of: AD-39748.1 (SEQ ID NOs: 200 and 627), or a modified or unmodified variant thereof.

[2437] A RNAi agent comprising a first and a second strand, wherein the sequences of the first and/or second strands are the sequences of the first and/or second strands of: AD-39754.1 (SEQ ID NOs: 201 and 628), or a modified or unmodified variant thereof.

[2438] A RNAi agent comprising a first and a second strand, wherein the sequences of the first and/or second strands are the sequences of the first and/or second strands of: AD-39760.1 (SEQ ID NOs: 202 and 629), or a modified or unmodified variant thereof.

[2439] A RNAi agent comprising a first and a second strand, wherein the sequences of the first and/or second strands are the sequences of the first and/or second strands of: AD-39766.1 (SEQ ID NOs: 203 and 630), or a modified or unmodified variant thereof.

[2440] A RNAi agent comprising a first and a second strand, wherein the sequences of the first and/or second strands are the sequences of the first and/or second strands of: AD-39772.1 (SEQ ID NOs: 204 and 631), or a modified or unmodified variant thereof.

[2441] A RNAi agent comprising a first and a second strand, wherein the sequences of the first and/or second strands are the sequences of the first and/or second strands of: AD-39731.1 (SEQ ID NOs: 205 and 632), or a modified or unmodified variant thereof.

[2442] A RNAi agent comprising a first and a second strand, wherein the sequences of the first and/or second strands are the sequences of the first and/or second strands of: AD-39737.1 (SEQ ID NOs: 206 and 633), or a modified or unmodified variant thereof.

[2443] A RNAi agent comprising a first and a second strand, wherein the sequences of the first and/or second strands are the sequences of the first and/or second strands of: AD-39743.1 (SEQ ID NOs: 207 and 634), or a modified or unmodified variant thereof.

[2444] A RNAi agent comprising a first and a second strand, wherein the sequences of the first and/or second strands are the sequences of the first and/or second strands of: AD-39749.1 (SEQ ID NOs: 208 and 635), or a modified or unmodified variant thereof.

[2445] A RNAi agent comprising a first and a second strand, wherein the sequences of the first and/or second strands are the sequences of the first and/or second strands of: AD-39755.1 (SEQ ID NOs: 209 and 636), or a modified or unmodified variant thereof.

[2446] A RNAi agent comprising a first and a second strand, wherein the sequences of the first and/or second strands are the sequences of the first and/or second strands of: AD-39761.1 (SEQ ID NOs: 210 and 637), or a modified or unmodified variant thereof.

[2447] A RNAi agent comprising a first and a second strand, wherein the sequences of the first and/or second strands are the sequences of the first and/or second strands of: AD-39767.1 (SEQ ID NOs: 211 and 638), or a modified or unmodified variant thereof.

[2448] A RNAi agent comprising a first and a second strand, wherein the sequences of the first and/or second strands are the sequences of the first and/or second strands of: AD-39773.1 (SEQ ID NOs: 212 and 639), or a modified or unmodified variant thereof.

[2449] A RNAi agent comprising a first and a second strand, wherein the sequences of the first and/or second strands are the sequences of the first and/or second strands of: AD-39732.1 (SEQ ID NOs: 213 and 640), or a modified or unmodified variant thereof.

[2450] A RNAi agent comprising a first and a second strand, wherein the sequences of the first and/or second strands are the sequences of the first and/or second strands of: AD-39738.1 (SEQ ID NOs: 214 and 641), or a modified or unmodified variant thereof.

[2451] A RNAi agent comprising a first and a second strand, wherein the sequences of the first and/or second strands are the sequences of the first and/or second strands of: AD-39744.1 (SEQ ID NOs: 215 and 642), or a modified or unmodified variant thereof.

[2452] A RNAi agent comprising a first and a second strand, wherein the sequences of the first and/or second strands are the sequences of the first and/or second strands of: AD-39750.1 (SEQ ID NOs: 216 and 643), or a modified or unmodified variant thereof.

[2453] A RNAi agent comprising a first and a second strand, wherein the sequences of the first and/or second strands are the sequences of the first and/or second strands of: AD-39756.1 (SEQ ID NOs: 217 and 644), or a modified or unmodified variant thereof.

[2454] A RNAi agent comprising a first and a second strand, wherein the sequences of the first and/or second strands are the sequences of the first and/or second strands of: AD-39762.1 (SEQ ID NOs: 218 and 645), or a modified or unmodified variant thereof.

[2455] A RNAi agent comprising a first and a second strand, wherein the sequences of the first and/or second strands are the sequences of the first and/or second strands of: AD-39768.1 (SEQ ID NOs: 219 and 646), or a modified or unmodified variant thereof.

[2456] A RNAi agent comprising a first and a second strand, wherein the sequences of the first and/or second strands are the sequences of the first and/or second strands of: AD-39774.1 (SEQ ID NOs: 220 and 647), or a modified or unmodified variant thereof.

[2457] A RNAi agent comprising a first and a second strand, wherein the sequences of the first and/or second strands are the sequences of the first and/or second strands of: AD-39733.1 (SEQ ID NOs: 221 and 648), or a modified or unmodified variant thereof.

[2458] A RNAi agent comprising a first and a second strand, wherein the sequences of the first and/or second strands are the sequences of the first and/or second strands of: AD-39739.1 (SEQ ID NOs: 222 and 649), or a modified or unmodified variant thereof.

[2459] A RNAi agent comprising a first and a second strand, wherein the sequences of the first and/or second strands are the sequences of the first and/or second strands of: AD-39745.1 (SEQ ID NOs: 223 and 650), or a modified or unmodified variant thereof.

[2460] A RNAi agent comprising a first and a second strand, wherein the sequences of the first and/or second strands are the sequences of the first and/or second strands of: AD-39751.1 (SEQ ID NOs: 224 and 651), or a modified or unmodified variant thereof.

[2461] A RNAi agent comprising a first and a second strand, wherein the sequences of the first and/or second strands are the sequences of the first and/or second strands of: AD-39757.1 (SEQ ID NOs: 225 and 652), or a modified or unmodified variant thereof.

[2462] A RNAi agent comprising a first and a second strand, wherein the sequences of the first and/or second strands are the sequences of the first and/or second strands of: AD-39763.1 (SEQ ID NOs: 226 and 653), or a modified or unmodified variant thereof.

[2463] A RNAi agent comprising a first and a second strand, wherein the sequences of the first and/or second strands are the sequences of the first and/or second strands of: AD-39769.1 (SEQ ID NOs: 227 and 654), or a modified or unmodified variant thereof.

[2464] A RNAi agent comprising a first and a second strand, wherein the sequences of the first and/or second strands are the sequences of the first and/or second strands of: AD-39775.1 (SEQ ID NOs: 228 and 655), or a modified or unmodified variant thereof.

[2465] A RNAi agent comprising a first and a second strand, wherein the sequences of the first and/or second strands are the sequences of the first and/or second strands of: AD-39734.1 (SEQ ID NOs: 229 and 656), or a modified or unmodified variant thereof.

[2466] A RNAi agent comprising a first and a second strand, wherein the sequences of the first and/or second strands are the sequences of the first and/or second strands of: AD-39740.1 (SEQ ID NOs: 230 and 657), or a modified or unmodified variant thereof.

[2467] A RNAi agent comprising a first and a second strand, wherein the sequences of the first and/or second strands are the sequences of the first and/or second strands of: AD-39746.1 (SEQ ID NOs: 231 and 658), or a modified or unmodified variant thereof.

[2468] A RNAi agent comprising a first and a second strand, wherein the sequences of the first and/or second strands are the sequences of the first and/or second strands of: AD-39752.1 (SEQ ID NOs: 232 and 659), or a modified or unmodified variant thereof.

[2469] A RNAi agent comprising a first and a second strand, wherein the sequences of the first and/or second strands are the sequences of the first and/or second strands of: AD-39758.1 (SEQ ID NOs: 233 and 660), or a modified or unmodified variant thereof.

[2470] A RNAi agent comprising a first and a second strand, wherein the sequences of the first and/or second strands are the sequences of the first and/or second strands of: AD-39764.1 (SEQ ID NOs: 234 and 661), or a modified or unmodified variant thereof.

[2471] A RNAi agent comprising a first and a second strand, wherein the sequences of the first and/or second strands are the sequences of the first and/or second strands of: AD-39770.1 (SEQ ID NOs: 235 and 662), or a modified or unmodified variant thereof.

[2472] A RNAi agent comprising a first and a second strand, wherein the sequences of the first and/or second strands are the sequences of the first and/or second strands of: AD-39776.1 (SEQ ID NOs: 236 and 663), or a modified or unmodified variant thereof.

[2473] A RNAi agent comprising a first and a second strand, wherein the sequences of the first and/or second strands are the sequences of the first and/or second strands of: AD-39735.1 (SEQ ID NOs: 237 and 664), or a modified or unmodified variant thereof.

[2474] A RNAi agent comprising a first and a second strand, wherein the sequences of the first and/or second strands are the sequences of the first and/or second strands of: AD-39741.1 (SEQ ID NOs: 238 and 665), or a modified or unmodified variant thereof.

[2475] A RNAi agent comprising a first and a second strand, wherein the sequences of the first and/or second strands are the sequences of the first and/or second strands of: AD-39747.1 (SEQ ID NOs: 239 and 666), or a modified or unmodified variant thereof.

[2476] A RNAi agent comprising a first and a second strand, wherein the sequences of the first and/or second strands are the sequences of the first and/or second strands of: AD-39753.1 (SEQ ID NOs: 240 and 667), or a modified or unmodified variant thereof.

[2477] A RNAi agent comprising a first and a second strand, wherein the sequences of the first and/or second strands are the sequences of the first and/or second strands of: AD-39759.1 (SEQ ID NOs: 241 and 668), or a modified or unmodified variant thereof.

[2478] A RNAi agent comprising a first and a second strand, wherein the sequences of the first and/or second strands are the sequences of the first and/or second strands of: AD-39765.1 (SEQ ID NOs: 242 and 669), or a modified or unmodified variant thereof.

[2479] A RNAi agent comprising a first and a second strand, wherein the sequences of the first and/or second strands are the sequences of the first and/or second strands of: AD-39771.1 (SEQ ID NOs: 243 and 670), or a modified or unmodified variant thereof.

[2480] A RNAi agent comprising a first and a second strand, wherein the sequences of the first and/or second strands are the sequences of the first and/or second strands of: AD-39778.1 (SEQ ID NOs: 244 and 671), or a modified or unmodified variant thereof.

[2481] A RNAi agent comprising a first and a second strand, wherein the sequences of the first and/or second strands are the sequences of the first and/or second strands of: AD-39784.1 (SEQ ID NOs: 245 and 672), or a modified or unmodified variant thereof.

[2482] A RNAi agent comprising a first and a second strand, wherein the sequences of the first and/or second strands are the sequences of the first and/or second strands of: AD-39790.1 (SEQ ID NOs: 246 and 673), or a modified or unmodified variant thereof.

[2483] A RNAi agent comprising a first and a second strand, wherein the sequences of the first and/or second strands are the sequences of the first and/or second strands of: AD-39796.1 (SEQ ID NOs: 247 and 674), or a modified or unmodified variant thereof.

[2484] A RNAi agent comprising a first and a second strand, wherein the sequences of the first and/or second strands are the sequences of the first and/or second strands of: AD-39802.1 (SEQ ID NOs: 248 and 675), or a modified or unmodified variant thereof.

[2485] A RNAi agent comprising a first and a second strand, wherein the sequences of the first and/or second strands are the sequences of the first and/or second strands of: AD-39808.1 (SEQ ID NOs: 249 and 676), or a modified or unmodified variant thereof.

[2486] A RNAi agent comprising a first and a second strand, wherein the sequences of the first and/or second strands are the sequences of the first and/or second strands of: AD-39814.1 (SEQ ID NOs: 250 and 677), or a modified or unmodified variant thereof.

[2487] A RNAi agent comprising a first and a second strand, wherein the sequences of the first and/or second strands are the sequences of the first and/or second strands of: AD-39820.1 (SEQ ID NOs: 251 and 678), or a modified or unmodified variant thereof.

[2488] A RNAi agent comprising a first and a second strand, wherein the sequences of the first and/or second strands are the sequences of the first and/or second strands of: AD-39779.1 (SEQ ID NOs: 252 and 679), or a modified or unmodified variant thereof.

[2489] A RNAi agent comprising a first and a second strand, wherein the sequences of the first and/or second strands are the sequences of the first and/or second strands of: AD-39785.1 (SEQ ID NOs: 253 and 680), or a modified or unmodified variant thereof.

[2490] A RNAi agent comprising a first and a second strand, wherein the sequences of the first and/or second strands are the sequences of the first and/or second strands of: AD-39791.1 (SEQ ID NOs: 254 and 681), or a modified or unmodified variant thereof.

[2491] A RNAi agent comprising a first and a second strand, wherein the sequences of the first and/or second strands are the sequences of the first and/or second strands of: AD-39797.1 (SEQ ID NOs: 255 and 682), or a modified or unmodified variant thereof.

[2492] A RNAi agent comprising a first and a second strand, wherein the sequences of the first and/or second strands are the sequences of the first and/or second strands of: AD-39803.1 (SEQ ID NOs: 256 and 683), or a modified or unmodified variant thereof.

[2493] A RNAi agent comprising a first and a second strand, wherein the sequences of the first and/or second strands are the sequences of the first and/or second strands of: AD-39809.1 (SEQ ID NOs: 257 and 684), or a modified or unmodified variant thereof.

[2494] A RNAi agent comprising a first and a second strand, wherein the sequences of the first and/or second strands are the sequences of the first and/or second strands of: AD-39815.1 (SEQ ID NOs: 258 and 685), or a modified or unmodified variant thereof.

[2495] A RNAi agent comprising a first and a second strand, wherein the sequences of the first and/or second strands are the sequences of the first and/or second strands of: AD-39821.1 (SEQ ID NOs: 259 and 686), or a modified or unmodified variant thereof.

[2496] A RNAi agent comprising a first and a second strand, wherein the sequences of the first and/or second strands are the sequences of the first and/or second strands of: AD-39780.1 (SEQ ID NOs: 260 and 687), or a modified or unmodified variant thereof.

[2497] A RNAi agent comprising a first and a second strand, wherein the sequences of the first and/or second strands are the sequences of the first and/or second strands of: AD-39786.1 (SEQ ID NOs: 261 and 688), or a modified or unmodified variant thereof.

[2498] A RNAi agent comprising a first and a second strand, wherein the sequences of the first and/or second strands are the sequences of the first and/or second strands of: AD-39792.1 (SEQ ID NOs: 262 and 689), or a modified or unmodified variant thereof.

[2499] A RNAi agent comprising a first and a second strand, wherein the sequences of the first and/or second strands are the sequences of the first and/or second strands of: AD-39798.1 (SEQ ID NOs: 263 and 690), or a modified or unmodified variant thereof.

[2500] A RNAi agent comprising a first and a second strand, wherein the sequences of the first and/or second strands are the sequences of the first and/or second strands of: AD-39804.1 (SEQ ID NOs: 264 and 691), or a modified or unmodified variant thereof.

[2501] A RNAi agent comprising a first and a second strand, wherein the sequences of the first and/or second strands are the sequences of the first and/or second strands of: AD-39810.1 (SEQ ID NOs: 265 and 692), or a modified or unmodified variant thereof.

[2502] A RNAi agent comprising a first and a second strand, wherein the sequences of the first and/or second strands are the sequences of the first and/or second strands of: AD-39816.1 (SEQ ID NOs: 266 and 693), or a modified or unmodified variant thereof.

[2503] A RNAi agent comprising a first and a second strand, wherein the sequences of the first and/or second strands are the sequences of the first and/or second strands of: AD-39822.1 (SEQ ID NOs: 267 and 694), or a modified or unmodified variant thereof.

[2504] A RNAi agent comprising a first and a second strand, wherein the sequences of the first and/or second strands are the sequences of the first and/or second strands of: AD-39781.1 (SEQ ID NOs: 268 and 695), or a modified or unmodified variant thereof.

[2505] A RNAi agent comprising a first and a second strand, wherein the sequences of the first and/or second strands are the sequences of the first and/or second strands of: AD-39787.1 (SEQ ID NOs: 269 and 696), or a modified or unmodified variant thereof.

[2506] A RNAi agent comprising a first and a second strand, wherein the sequences of the first and/or second strands are the sequences of the first and/or second strands of: AD-39793.1 (SEQ ID NOs: 270 and 697), or a modified or unmodified variant thereof.

[2507] A RNAi agent comprising a first and a second strand, wherein the sequences of the first and/or second strands are the sequences of the first and/or second strands of: AD-39799.1 (SEQ ID NOs: 271 and 698), or a modified or unmodified variant thereof.

[2508] A RNAi agent comprising a first and a second strand, wherein the sequences of the first and/or second strands are the sequences of the first and/or second strands of: AD-39805.1 (SEQ ID NOs: 272 and 699), or a modified or unmodified variant thereof.

[2509] A RNAi agent comprising a first and a second strand, wherein the sequences of the first and/or second strands are the sequences of the first and/or second strands of: AD-39811.1 (SEQ ID NOs: 273 and 700), or a modified or unmodified variant thereof.

[2510] A RNAi agent comprising a first and a second strand, wherein the sequences of the first and/or second strands are the sequences of the first and/or second strands of: AD-39817.1 (SEQ ID NOs: 274 and 701), or a modified or unmodified variant thereof.

[2511] A RNAi agent comprising a first and a second strand, wherein the sequences of the first and/or second strands are the sequences of the first and/or second strands of: AD-39823.1 (SEQ ID NOs: 275 and 702), or a modified or unmodified variant thereof.

[2512] A RNAi agent comprising a first and a second strand, wherein the sequences of the first and/or second strands are the sequences of the first and/or second strands of: AD-39782.1 (SEQ ID NOs: 276 and 703), or a modified or unmodified variant thereof.

[2513] A RNAi agent comprising a first and a second strand, wherein the sequences of the first and/or second strands are the sequences of the first and/or second strands of: AD-39788.1 (SEQ ID NOs: 277 and 704), or a modified or unmodified variant thereof.

[2514] A RNAi agent comprising a first and a second strand, wherein the sequences of the first and/or second strands are the sequences of the first and/or second strands of: AD-39794.1 (SEQ ID NOs: 278 and 705), or a modified or unmodified variant thereof.

[2515] A RNAi agent comprising a first and a second strand, wherein the sequences of the first and/or second strands are the sequences of the first and/or second strands of: AD-39800.1 (SEQ ID NOs: 279 and 706), or a modified or unmodified variant thereof.

[2516] A RNAi agent comprising a first and a second strand, wherein the sequences of the first and/or second strands are the sequences of the first and/or second strands of: AD-39806.1 (SEQ ID NOs: 280 and 707), or a modified or unmodified variant thereof.

[2517] A RNAi agent comprising a first and a second strand, wherein the sequences of the first and/or second strands are the sequences of the first and/or second strands of: AD-39812.1 (SEQ ID NOs: 281 and 708), or a modified or unmodified variant thereof.

[2518] A RNAi agent comprising a first and a second strand, wherein the sequences of the first and/or second strands are the sequences of the first and/or second strands of: AD-39818.1 (SEQ ID NOs: 282 and 709), or a modified or unmodified variant thereof.

[2519] A RNAi agent comprising a first and a second strand, wherein the sequences of the first and/or second strands are the sequences of the first and/or second strands of: AD-39824.1 (SEQ ID NOs: 283 and 710), or a modified or unmodified variant thereof.

[2520] A RNAi agent comprising a first and a second strand, wherein the sequences of the first and/or second strands are the sequences of the first and/or second strands of: AD-39783.1 (SEQ ID NOs: 284 and 711), or a modified or unmodified variant thereof.

[2521] A RNAi agent comprising a first and a second strand, wherein the sequences of the first and/or second strands are the sequences of the first and/or second strands of: AD-39789.1 (SEQ ID NOs: 285 and 712), or a modified or unmodified variant thereof.

[2522] A RNAi agent comprising a first and a second strand, wherein the sequences of the first and/or second strands are the sequences of the first and/or second strands of: AD-39795.1 (SEQ ID NOs: 286 and 713), or a modified or unmodified variant thereof.

[2523] A RNAi agent comprising a first and a second strand, wherein the sequences of the first and/or second strands are the sequences of the first and/or second strands of: AD-39801.1 (SEQ ID NOs: 287 and 714), or a modified or unmodified variant thereof.

[2524] A RNAi agent comprising a first and a second strand, wherein the sequences of the first and/or second strands are the sequences of the first and/or second strands of: AD-39807.1 (SEQ ID NOs: 288 and 715), or a modified or unmodified variant thereof.

[2525] A RNAi agent comprising a first and a second strand, wherein the sequences of the first and/or second strands are the sequences of the first and/or second strands of: AD-39813.1 (SEQ ID NOs: 289 and 716), or a modified or unmodified variant thereof.

[2526] A RNAi agent comprising a first and a second strand, wherein the sequences of the first and/or second strands are the sequences of the first and/or second strands of: AD-39819.1 (SEQ ID NOs: 290 and 717), or a modified or unmodified variant thereof.

[2527] A RNAi agent comprising a first and a second strand, wherein the sequences of the first and/or second strands are the sequences of the first and/or second strands of: AD-39825.1 (SEQ ID NOs: 291 and 718), or a modified or unmodified variant thereof.

[2528] A RNAi agent comprising a first and a second strand, wherein the sequences of the first and/or second strands are the sequences of the first and/or second strands of: AD-39831.1 (SEQ ID NOs: 292 and 719), or a modified or unmodified variant thereof.

[2529] A RNAi agent comprising a first and a second strand, wherein the sequences of the first and/or second strands are the sequences of the first and/or second strands of: AD-39837.1 (SEQ ID NOs: 293 and 720), or a modified or unmodified variant thereof.

[2530] A RNAi agent comprising a first and a second strand, wherein the sequences of the first and/or second strands are the sequences of the first and/or second strands of: AD-39843.1 (SEQ ID NOs: 294 and 721), or a modified or unmodified variant thereof.

[2531] A RNAi agent comprising a first and a second strand, wherein the sequences of the first and/or second strands are the sequences of the first and/or second strands of: AD-39849.1 (SEQ ID NOs: 295 and 722), or a modified or unmodified variant thereof.

[2532] A RNAi agent comprising a first and a second strand, wherein the sequences of the first and/or second strands are the sequences of the first and/or second strands of: AD-39855.1 (SEQ ID NOs: 296 and 723), or a modified or unmodified variant thereof.

[2533] A RNAi agent comprising a first and a second strand, wherein the sequences of the first and/or second strands are the sequences of the first and/or second strands of: AD-39861.1 (SEQ ID NOs: 297 and 724), or a modified or unmodified variant thereof.

[2534] A RNAi agent comprising a first and a second strand, wherein the sequences of the first and/or second strands are the sequences of the first and/or second strands of: AD-39867.1 (SEQ ID NOs: 298 and 725), or a modified or unmodified variant thereof.

[2535] A RNAi agent comprising a first and a second strand, wherein the sequences of the first and/or second strands are the sequences of the first and/or second strands of: AD-39826.1 (SEQ ID NOs: 299 and 726), or a modified or unmodified variant thereof.

[2536] A RNAi agent comprising a first and a second strand, wherein the sequences of the first and/or second strands are the sequences of the first and/or second strands of: AD-39832.1 (SEQ ID NOs: 300 and 727), or a modified or unmodified variant thereof.

[2537] A RNAi agent comprising a first and a second strand, wherein the sequences of the first and/or second strands are the sequences of the first and/or second strands of: AD-39838.1 (SEQ ID NOs: 301 and 728), or a modified or unmodified variant thereof.

[2538] A RNAi agent comprising a first and a second strand, wherein the sequences of the first and/or second strands are the sequences of the first and/or second strands of: AD-39844.1 (SEQ ID NOs: 302 and 729), or a modified or unmodified variant thereof.

[2539] A RNAi agent comprising a first and a second strand, wherein the sequences of the first and/or second strands are the sequences of the first and/or second strands of: AD-39850.1 (SEQ ID NOs: 303 and 730), or a modified or unmodified variant thereof.

[2540] A RNAi agent comprising a first and a second strand, wherein the sequences of the first and/or second strands are the sequences of the first and/or second strands of: AD-39856.1 (SEQ ID NOs: 304 and 731), or a modified or unmodified variant thereof.

[2541] A RNAi agent comprising a first and a second strand, wherein the sequences of the first and/or second strands are the sequences of the first and/or second strands of: AD-39862.1 (SEQ ID NOs: 305 and 732), or a modified or unmodified variant thereof.

[2542] A RNAi agent comprising a first and a second strand, wherein the sequences of the first and/or second strands are the sequences of the first and/or second strands of: AD-39868.1 (SEQ ID NOs: 306 and 733), or a modified or unmodified variant thereof.

[2543] A RNAi agent comprising a first and a second strand, wherein the sequences of the first and/or second strands are the sequences of the first and/or second strands of: AD-39827.1 (SEQ ID NOs: 307 and 734), or a modified or unmodified variant thereof.

[2544] A RNAi agent comprising a first and a second strand, wherein the sequences of the first and/or second strands are the sequences of the first and/or second strands of: AD-39833.1 (SEQ ID NOs: 308 and 735), or a modified or unmodified variant thereof.

[2545] A RNAi agent comprising a first and a second strand, wherein the sequences of the first and/or second strands are the sequences of the first and/or second strands of: AD-39839.1 (SEQ ID NOs: 309 and 736), or a modified or unmodified variant thereof.

[2546] A RNAi agent comprising a first and a second strand, wherein the sequences of the first and/or second strands are the sequences of the first and/or second strands of: AD-39845.1 (SEQ ID NOs: 310 and 737), or a modified or unmodified variant thereof.

[2547] A RNAi agent comprising a first and a second strand, wherein the sequences of the first and/or second strands are the sequences of the first and/or second strands of: AD-39851.1 (SEQ ID NOs: 311 and 738), or a modified or unmodified variant thereof.

[2548] A RNAi agent comprising a first and a second strand, wherein the sequences of the first and/or second strands are the sequences of the first and/or second strands of: AD-39857.1 (SEQ ID NOs: 312 and 739), or a modified or unmodified variant thereof.

[2549] A RNAi agent comprising a first and a second strand, wherein the sequences of the first and/or second strands are the sequences of the first and/or second strands of: AD-39863.1 (SEQ ID NOs: 313 and 740), or a modified or unmodified variant thereof.

[2550] A RNAi agent comprising a first and a second strand, wherein the sequences of the first and/or second strands are the sequences of the first and/or second strands of: AD-39869.1 (SEQ ID NOs: 314 and 741), or a modified or unmodified variant thereof.

[2551] A RNAi agent comprising a first and a second strand, wherein the sequences of the first and/or second strands are the sequences of the first and/or second strands of: AD-39828.1 (SEQ ID NOs: 315 and 742), or a modified or unmodified variant thereof.

[2552] A RNAi agent comprising a first and a second strand, wherein the sequences of the first and/or second strands are the sequences of the first and/or second strands of: AD-39834.1 (SEQ ID NOs: 316 and 743), or a modified or unmodified variant thereof.

[2553] A RNAi agent comprising a first and a second strand, wherein the sequences of the first and/or second strands are the sequences of the first and/or second strands of: AD-39840.1 (SEQ ID NOs: 317 and 744), or a modified or unmodified variant thereof.

[2554] A RNAi agent comprising a first and a second strand, wherein the sequences of the first and/or second strands are the sequences of the first and/or second strands of: AD-39846.1 (SEQ ID NOs: 318 and 745), or a modified or unmodified variant thereof.

[2555] A RNAi agent comprising a first and a second strand, wherein the sequences of the first and/or second strands are the sequences of the first and/or second strands of: AD-39852.1 (SEQ ID NOs: 319 and 746), or a modified or unmodified variant thereof.

[2556] A RNAi agent comprising a first and a second strand, wherein the sequences of the first and/or second strands are the sequences of the first and/or second strands of: AD-39858.1 (SEQ ID NOs: 320 and 747), or a modified or unmodified variant thereof.

[2557] A RNAi agent comprising a first and a second strand, wherein the sequences of the first and/or second strands are the sequences of the first and/or second strands of: AD-39864.1 (SEQ ID NOs: 321 and 748), or a modified or unmodified variant thereof.

[2558] A RNAi agent comprising a first and a second strand, wherein the sequences of the first and/or second strands are the sequences of the first and/or second strands of: AD-39870.1 (SEQ ID NOs: 322 and 749), or a modified or unmodified variant thereof.

[2559] A RNAi agent comprising a first and a second strand, wherein the sequences of the first and/or second strands are the sequences of the first and/or second strands of: AD-39829.1 (SEQ ID NOs: 323 and 750), or a modified or unmodified variant thereof.

[2560] A RNAi agent comprising a first and a second strand, wherein the sequences of the first and/or second strands are the sequences of the first and/or second strands of: AD-39835.1 (SEQ ID NOs: 324 and 751), or a modified or unmodified variant thereof.

[2561] A RNAi agent comprising a first and a second strand, wherein the sequences of the first and/or second strands are the sequences of the first and/or second strands of: AD-39841.1 (SEQ ID NOs: 325 and 752), or a modified or unmodified variant thereof.

[2562] A RNAi agent comprising a first and a second strand, wherein the sequences of the first and/or second strands are the sequences of the first and/or second strands of: AD-39853.1 (SEQ ID NOs: 326 and 753), or a modified or unmodified variant thereof.

[2563] A RNAi agent comprising a first and a second strand, wherein the sequences of the first and/or second strands are the sequences of the first and/or second strands of: AD-39859.1 (SEQ ID NOs: 327 and 754), or a modified or unmodified variant thereof.

[2564] A RNAi agent comprising a first and a second strand, wherein the sequences of the first and/or second strands are the sequences of the first and/or second strands of: AD-39865.1 (SEQ ID NOs: 328 and 755), or a modified or unmodified variant thereof.

[2565] A RNAi agent comprising a first and a second strand, wherein the sequences of the first and/or second strands are the sequences of the first and/or second strands of: AD-39871.1 (SEQ ID NOs: 329 and 756), or a modified or unmodified variant thereof.

[2566] A RNAi agent comprising a first and a second strand, wherein the sequences of the first and/or second strands are the sequences of the first and/or second strands of: AD-39830.1 (SEQ ID NOs: 330 and 757), or a modified or unmodified variant thereof.

[2567] A RNAi agent comprising a first and a second strand, wherein the sequences of the first and/or second strands are the sequences of the first and/or second strands of: AD-39836.1 (SEQ ID NOs: 331 and 758), or a modified or unmodified variant thereof.

[2568] A RNAi agent comprising a first and a second strand, wherein the sequences of the first and/or second strands are the sequences of the first and/or second strands of: AD-39842.1 (SEQ ID NOs: 332 and 759), or a modified or unmodified variant thereof.

[2569] A RNAi agent comprising a first and a second strand, wherein the sequences of the first and/or second strands are the sequences of the first and/or second strands of: AD-39848.1 (SEQ ID NOs: 333 and 760), or a modified or unmodified variant thereof.

[2570] A RNAi agent comprising a first and a second strand, wherein the sequences of the first and/or second strands are the sequences of the first and/or second strands of: AD-39854.1 (SEQ ID NOs: 334 and 761), or a modified or unmodified variant thereof.

[2571] A RNAi agent comprising a first and a second strand, wherein the sequences of the first and/or second strands are the sequences of the first and/or second strands of: AD-39860.1 (SEQ ID NOs: 335 and 762), or a modified or unmodified variant thereof.

[2572] A RNAi agent comprising a first and a second strand, wherein the sequences of the first and/or second strands are the sequences of the first and/or second strands of: AD-39866.1 (SEQ ID NOs: 336 and 763), or a modified or unmodified variant thereof.

[2573] A RNAi agent comprising a first and a second strand, wherein the sequences of the first and/or second strands are the sequences of the first and/or second strands of: AD-39992.1 (SEQ ID NOs: 337 and 764), or a modified or unmodified variant thereof.

[2574] A RNAi agent comprising a first and a second strand, wherein the sequences of the first and/or second strands are the sequences of the first and/or second strands of: AD-39998.1 (SEQ ID NOs: 338 and 765), or a modified or unmodified variant thereof.

[2575] A RNAi agent comprising a first and a second strand, wherein the sequences of the first and/or second strands are the sequences of the first and/or second strands of: AD-40004.1 (SEQ ID NOs: 339 and 766), or a modified or unmodified variant thereof.

[2576] A RNAi agent comprising a first and a second strand, wherein the sequences of the first and/or second strands are the sequences of the first and/or second strands of: AD-40010.1 (SEQ ID NOs: 340 and 767), or a modified or unmodified variant thereof.

[2577] A RNAi agent comprising a first and a second strand, wherein the sequences of the first and/or second strands are the sequences of the first and/or second strands of: AD-40016.1 (SEQ ID NOs: 341 and 768), or a modified or unmodified variant thereof.

[2578] A RNAi agent comprising a first and a second strand, wherein the sequences of the first and/or second strands are the sequences of the first and/or second strands of: AD-40022.1 (SEQ ID NOs: 342 and 769), or a modified or unmodified variant thereof.

[2579] A RNAi agent comprising a first and a second strand, wherein the sequences of the first and/or second strands are the sequences of the first and/or second strands of: AD-40028.1 (SEQ ID NOs: 343 and 770), or a modified or unmodified variant thereof.

[2580] A RNAi agent comprising a first and a second strand, wherein the sequences of the first and/or second strands are the sequences of the first and/or second strands of: AD-40034.1 (SEQ ID NOs: 344 and 771), or a modified or unmodified variant thereof.

[2581] A RNAi agent comprising a first and a second strand, wherein the sequences of the first and/or second strands are the sequences of the first and/or second strands of: AD-39999.1 (SEQ ID NOs: 345 and 772), or a modified or unmodified variant thereof.

[2582] A RNAi agent comprising a first and a second strand, wherein the sequences of the first and/or second strands are the sequences of the first and/or second strands of: AD-40005.1 (SEQ ID NOs: 346 and 773), or a modified or unmodified variant thereof.

[2583] A RNAi agent comprising a first and a second strand, wherein the sequences of the first and/or second strands are the sequences of the first and/or second strands of: AD-40011.1 (SEQ ID NOs: 347 and 774), or a modified or unmodified variant thereof.

[2584] A RNAi agent comprising a first and a second strand, wherein the sequences of the first and/or second strands are the sequences of the first and/or second strands of: AD-40017.1 (SEQ ID NOs: 348 and 775), or a modified or unmodified variant thereof.

[2585] A RNAi agent comprising a first and a second strand, wherein the sequences of the first and/or second strands are the sequences of the first and/or second strands of: AD-40029.1 (SEQ ID NOs: 349 and 776), or a modified or unmodified variant thereof.

[2586] A RNAi agent comprising a first and a second strand, wherein the sequences of the first and/or second strands are the sequences of the first and/or second strands of: AD-40035.1 (SEQ ID NOs: 350 and 777), or a modified or unmodified variant thereof.

[2587] A RNAi agent comprising a first and a second strand, wherein the sequences of the first and/or second strands are the sequences of the first and/or second strands of: AD-39994.1 (SEQ ID NOs: 351 and 778), or a modified or unmodified variant thereof.

[2588] A RNAi agent comprising a first and a second strand, wherein the sequences of the first and/or second strands are the sequences of the first and/or second strands of: AD-40000.1 (SEQ ID NOs: 352 and 779), or a modified or unmodified variant thereof.

[2589] A RNAi agent comprising a first and a second strand, wherein the sequences of the first and/or second strands are the sequences of the first and/or second strands of: AD-40006.1 (SEQ ID NOs: 353 and 780), or a modified or unmodified variant thereof.

[2590] A RNAi agent comprising a first and a second strand, wherein the sequences of the first and/or second strands are the sequences of the first and/or second strands of: AD-40012.1 (SEQ ID NOs: 354 and 781), or a modified or unmodified variant thereof.

[2591] A RNAi agent comprising a first and a second strand, wherein the sequences of the first and/or second strands are the sequences of the first and/or second strands of: AD-40018.1 (SEQ ID NOs: 355 and 782), or a modified or unmodified variant thereof.

[2592] A RNAi agent comprising a first and a second strand, wherein the sequences of the first and/or second strands are the sequences of the first and/or second strands of: AD-40024.1 (SEQ ID NOs: 356 and 783), or a modified or unmodified variant thereof.

[2593] A RNAi agent comprising a first and a second strand, wherein the sequences of the first and/or second strands are the sequences of the first and/or second strands of: AD-40030.1 (SEQ ID NOs: 357 and 784), or a modified or unmodified variant thereof.

[2594] A RNAi agent comprising a first and a second strand, wherein the sequences of the first and/or second strands are the sequences of the first and/or second strands of: AD-40036.1 (SEQ ID NOs: 358 and 785), or a modified or unmodified variant thereof.

[2595] A RNAi agent comprising a first and a second strand, wherein the sequences of the first and/or second strands are the sequences of the first and/or second strands of: AD-39995.1 (SEQ ID NOs: 359 and 786), or a modified or unmodified variant thereof.

[2596] A RNAi agent comprising a first and a second strand, wherein the sequences of the first and/or second strands are the sequences of the first and/or second strands of: AD-40001.1 (SEQ ID NOs: 360 and 787), or a modified or unmodified variant thereof.

[2597] A RNAi agent comprising a first and a second strand, wherein the sequences of the first and/or second strands are the sequences of the first and/or second strands of: AD-40007.1 (SEQ ID NOs: 361 and 788), or a modified or unmodified variant thereof.

[2598] A RNAi agent comprising a first and a second strand, wherein the sequences of the first and/or second strands are the sequences of the first and/or second strands of: AD-40013.1 (SEQ ID NOs: 362 and 789), or a modified or unmodified variant thereof.

[2599] A RNAi agent comprising a first and a second strand, wherein the sequences of the first and/or second strands are the sequences of the first and/or second strands of: AD-40019.1 (SEQ ID NOs: 363 and 790), or a modified or unmodified variant thereof.

[2600] A RNAi agent comprising a first and a second strand, wherein the sequences of the first and/or second strands are the sequences of the first and/or second strands of: AD-40025.1 (SEQ ID NOs: 364 and 791), or a modified or unmodified variant thereof.

[2601] A RNAi agent comprising a first and a second strand, wherein the sequences of the first and/or second strands are the sequences of the first and/or second strands of: AD-40031.1 (SEQ ID NOs: 365 and 792), or a modified or unmodified variant thereof.

[2602] A RNAi agent comprising a first and a second strand, wherein the sequences of the first and/or second strands are the sequences of the first and/or second strands of: AD-40037.1 (SEQ ID NOs: 366 and 793), or a modified or unmodified variant thereof.

[2603] A RNAi agent comprising a first and a second strand, wherein the sequences of the first and/or second strands are the sequences of the first and/or second strands of: AD-39996.1 (SEQ ID NOs: 367 and 794), or a modified or unmodified variant thereof.

[2604] A RNAi agent comprising a first and a second strand, wherein the sequences of the first and/or second strands are the sequences of the first and/or second strands of: AD-40002.1 (SEQ ID NOs: 368 and 795), or a modified or unmodified variant thereof.

[2605] A RNAi agent comprising a first and a second strand, wherein the sequences of the first and/or second strands are the sequences of the first and/or second strands of: AD-40008.1 (SEQ ID NOs: 369 and 796), or a modified or unmodified variant thereof.

[2606] A RNAi agent comprising a first and a second strand, wherein the sequences of the first and/or second strands are the sequences of the first and/or second strands of: AD-40014.1 (SEQ ID NOs: 370 and 797), or a modified or unmodified variant thereof.

[2607] A RNAi agent comprising a first and a second strand, wherein the sequences of the first and/or second strands are the sequences of the first and/or second strands of: AD-40020.1 (SEQ ID NOs: 371 and 798), or a modified or unmodified variant thereof.

[2608] A RNAi agent comprising a first and a second strand, wherein the sequences of the first and/or second strands are the sequences of the first and/or second strands of: AD-40026.1 (SEQ ID NOs: 372 and 799), or a modified or unmodified variant thereof.

[2609] A RNAi agent comprising a first and a second strand, wherein the sequences of the first and/or second strands are the sequences of the first and/or second strands of: AD-40032.1 (SEQ ID NOs: 373 and 800), or a modified or unmodified variant thereof.

[2610] A RNAi agent comprising a first and a second strand, wherein the sequences of the first and/or second strands are the sequences of the first and/or second strands of: AD-40038.1 (SEQ ID NOs: 374 and 801), or a modified or unmodified variant thereof.

[2611] A RNAi agent comprising a first and a second strand, wherein the sequences of the first and/or second strands are the sequences of the first and/or second strands of: AD-39997.1 (SEQ ID NOs: 375 and 802), or a modified or unmodified variant thereof.

[2612] A RNAi agent comprising a first and a second strand, wherein the sequences of the first and/or second strands are the sequences of the first and/or second strands of: AD-40009.1 (SEQ ID NOs: 376 and 803), or a modified or unmodified variant thereof.

[2613] A RNAi agent comprising a first and a second strand, wherein the sequences of the first and/or second strands are the sequences of the first and/or second strands of: AD-40015.1 (SEQ ID NOs: 377 and 804), or a modified or unmodified variant thereof.

[2614] A RNAi agent comprising a first and a second strand, wherein the sequences of the first and/or second strands are the sequences of the first and/or second strands of: AD-40021.1 (SEQ ID NOs: 378 and 805), or a modified or unmodified variant thereof.

[2615] A RNAi agent comprising a first and a second strand, wherein the sequences of the first and/or second strands are the sequences of the first and/or second strands of: AD-40027.1 (SEQ ID NOs: 379 and 806), or a modified or unmodified variant thereof.

[2616] A RNAi agent comprising a first and a second strand, wherein the sequences of the first and/or second strands are the sequences of the first and/or second strands of: AD-40033.1 (SEQ ID NOs: 380 and 807), or a modified or unmodified variant thereof.

[2617] A RNAi agent comprising a first and a second strand, wherein the sequences of the first and/or second strands are the sequences of the first and/or second strands of: AD-40039.1 (SEQ ID NOs: 381 and 808), or a modified or unmodified variant thereof.

[2618] A RNAi agent comprising a first and a second strand, wherein the sequences of the first and/or second strands are the sequences of the first and/or second strands of: AD-40045.1 (SEQ ID NOs: 382 and 809), or a modified or unmodified variant thereof.

[2619] A RNAi agent comprising a first and a second strand, wherein the sequences of the first and/or second strands are the sequences of the first and/or second strands of: AD-40051.1 (SEQ ID NOs: 383 and 810), or a modified or unmodified variant thereof.

[2620] A RNAi agent comprising a first and a second strand, wherein the sequences of the first and/or second strands are the sequences of the first and/or second strands of: AD-40057.1 (SEQ ID NOs: 384 and 811), or a modified or unmodified variant thereof.

[2621] A RNAi agent comprising a first and a second strand, wherein the sequences of the first and/or second strands are the sequences of the first and/or second strands of: AD-40063.1 (SEQ ID NOs: 385 and 812), or a modified or unmodified variant thereof.

[2622] A RNAi agent comprising a first and a second strand, wherein the sequences of the first and/or second strands are the sequences of the first and/or second strands of: AD-40069.1 (SEQ ID NOs: 386 and 813), or a modified or unmodified variant thereof.

[2623] A RNAi agent comprising a first and a second strand, wherein the sequences of the first and/or second strands are the sequences of the first and/or second strands of: AD-40075.1 (SEQ ID NOs: 387 and 814), or a modified or unmodified variant thereof.

[2624] A RNAi agent comprising a first and a second strand, wherein the sequences of the first and/or second strands are the sequences of the first and/or second strands of: AD-40081.1 (SEQ ID NOs: 388 and 815), or a modified or unmodified variant thereof.

[2625] A RNAi agent comprising a first and a second strand, wherein the sequences of the first and/or second strands are the sequences of the first and/or second strands of: AD-40040.1 (SEQ ID NOs: 389 and 816), or a modified or unmodified variant thereof.

[2626] A RNAi agent comprising a first and a second strand, wherein the sequences of the first and/or second strands are the sequences of the first and/or second strands of: AD-40046.1 (SEQ ID NOs: 390 and 817), or a modified or unmodified variant thereof.

[2627] A RNAi agent comprising a first and a second strand, wherein the sequences of the first and/or second strands are the sequences of the first and/or second strands of: AD-40052.1 (SEQ ID NOs: 391 and 818), or a modified or unmodified variant thereof.

[2628] A RNAi agent comprising a first and a second strand, wherein the sequences of the first and/or second strands are the sequences of the first and/or second strands of: AD-40058.1 (SEQ ID NOs: 392 and 819), or a modified or unmodified variant thereof.

[2629] A RNAi agent comprising a first and a second strand, wherein the sequences of the first and/or second strands are the sequences of the first and/or second strands of: AD-40064.1 (SEQ ID NOs: 393 and 820), or a modified or unmodified variant thereof.

[2630] A RNAi agent comprising a first and a second strand, wherein the sequences of the first and/or second strands are the sequences of the first and/or second strands of: AD-40070.1 (SEQ ID NOs: 394 and 821), or a modified or unmodified variant thereof.

[2631] A RNAi agent comprising a first and a second strand, wherein the sequences of the first and/or second strands are the sequences of the first and/or second strands of: AD-40076.1 (SEQ ID NOs: 395 and 822), or a modified or unmodified variant thereof.

[2632] A RNAi agent comprising a first and a second strand, wherein the sequences of the first and/or second strands are the sequences of the first and/or second strands of: AD-40082.1 (SEQ ID NOs: 396 and 823), or a modified or unmodified variant thereof.

[2633] A RNAi agent comprising a first and a second strand, wherein the sequences of the first and/or second strands are the sequences of the first and/or second strands of: AD-40041.1 (SEQ ID NOs: 397 and 824), or a modified or unmodified variant thereof.

[2634] A RNAi agent comprising a first and a second strand, wherein the sequences of the first and/or second strands are the sequences of the first and/or second strands of: AD-40047.1 (SEQ ID NOs: 398 and 825), or a modified or unmodified variant thereof.

[2635] A RNAi agent comprising a first and a second strand, wherein the sequences of the first and/or second strands are the sequences of the first and/or second strands of: AD-40053.1 (SEQ ID NOs: 399 and 826), or a modified or unmodified variant thereof.

[2636] A RNAi agent comprising a first and a second strand, wherein the sequences of the first and/or second strands are the sequences of the first and/or second strands of: AD-40059.1 (SEQ ID NOs: 400 and 827), or a modified or unmodified variant thereof.

[2637] A RNAi agent comprising a first and a second strand, wherein the sequences of the first and/or second strands are the sequences of the first and/or second strands of: AD-40065.1 (SEQ ID NOs: 401 and 828), or a modified or unmodified variant thereof.

[2638] A RNAi agent comprising a first and a second strand, wherein the sequences of the first and/or second strands are the sequences of the first and/or second strands of: AD-40071.1 (SEQ ID NOs: 402 and 829), or a modified or unmodified variant thereof.

[2639] A RNAi agent comprising a first and a second strand, wherein the sequences of the first and/or second strands are the sequences of the first and/or second strands of: AD-40077.1 (SEQ ID NOs: 403 and 830), or a modified or unmodified variant thereof.

[2640] A RNAi agent comprising a first and a second strand, wherein the sequences of the first and/or second strands are the sequences of the first and/or second strands of: AD-40083.1 (SEQ ID NOs: 404 and 831), or a modified or unmodified variant thereof.

[2641] A RNAi agent comprising a first and a second strand, wherein the sequences of the first and/or second strands are the sequences of the first and/or second strands of: AD-40042.1 (SEQ ID NOs: 405 and 832), or a modified or unmodified variant thereof.

[2642] A RNAi agent comprising a first and a second strand, wherein the sequences of the first and/or second strands are the sequences of the first and/or second strands of: AD-40048.1 (SEQ ID NOs: 406 and 833), or a modified or unmodified variant thereof.

[2643] A RNAi agent comprising a first and a second strand, wherein the sequences of the first and/or second strands are the sequences of the first and/or second strands of: AD-40054.1 (SEQ ID NOs: 407 and 834), or a modified or unmodified variant thereof.

[2644] A RNAi agent comprising a first and a second strand, wherein the sequences of the first and/or second strands are the sequences of the first and/or second strands of: AD-40060.1 (SEQ ID NOs: 408 and 835), or a modified or unmodified variant thereof.

[2645] A RNAi agent comprising a first and a second strand, wherein the sequences of the first and/or second strands are the sequences of the first and/or second strands of: AD-40066.1 (SEQ ID NOs: 409 and 836), or a modified or unmodified variant thereof.

[2646] A RNAi agent comprising a first and a second strand, wherein the sequences of the first and/or second strands are the sequences of the first and/or second strands of: AD-40072.1 (SEQ ID NOs: 410 and 837), or a modified or unmodified variant thereof.

[2647] A RNAi agent comprising a first and a second strand, wherein the sequences of the first and/or second strands are the sequences of the first and/or second strands of: AD-40078.1 (SEQ ID NOs: 411 and 838), or a modified or unmodified variant thereof.

[2648] A RNAi agent comprising a first and a second strand, wherein the sequences of the first and/or second strands are the sequences of the first and/or second strands of: AD-40084.1 (SEQ ID NOs: 412 and 839), or a modified or unmodified variant thereof.

[2649] A RNAi agent comprising a first and a second strand, wherein the sequences of the first and/or second strands are the sequences of the first and/or second strands of: AD-40043.1 (SEQ ID NOs: 413 and 840), or a modified or unmodified variant thereof.

[2650] A RNAi agent comprising a first and a second strand, wherein the sequences of the first and/or second strands are the sequences of the first and/or second strands of: AD-40049.1 (SEQ ID NOs: 414 and 841), or a modified or unmodified variant thereof.

[2651] A RNAi agent comprising a first and a second strand, wherein the sequences of the first and/or second strands are the sequences of the first and/or second strands of: AD-40055.1 (SEQ ID NOs: 415 and 842), or a modified or unmodified variant thereof.

[2652] A RNAi agent comprising a first and a second strand, wherein the sequences of the first and/or second strands are the sequences of the first and/or second strands of: AD-40061.1 (SEQ ID NOs: 416 and 843), or a modified or unmodified variant thereof.

[2653] A RNAi agent comprising a first and a second strand, wherein the sequences of the first and/or second strands are the sequences of the first and/or second strands of: AD-40067.1 (SEQ ID NOs: 417 and 844), or a modified or unmodified variant thereof.

[2654] A RNAi agent comprising a first and a second strand, wherein the sequences of the first and/or second strands are the sequences of the first and/or second strands of: AD-40073.1 (SEQ ID NOs: 418 and 845), or a modified or unmodified variant thereof.

[2655] A RNAi agent comprising a first and a second strand, wherein the sequences of the first and/or second strands are the sequences of the first and/or second strands of: AD-40079.1 (SEQ ID NOs: 419 and 846), or a modified or unmodified variant thereof.

[2656] A RNAi agent comprising a first and a second strand, wherein the sequences of the first and/or second strands are the sequences of the first and/or second strands of: AD-40085.1 (SEQ ID NOs: 420 and 847), or a modified or unmodified variant thereof.

[2657] A RNAi agent comprising a first and a second strand, wherein the sequences of the first and/or second strands are the sequences of the first and/or second strands of: AD-40044.1 (SEQ ID NOs: 421 and 848), or a modified or unmodified variant thereof.

[2658] A RNAi agent comprising a first and a second strand, wherein the sequences of the first and/or second strands are the sequences of the first and/or second strands of: AD-40050.1 (SEQ ID NOs: 422 and 849), or a modified or unmodified variant thereof.

[2659] A RNAi agent comprising a first and a second strand, wherein the sequences of the first and/or second strands are the sequences of the first and/or second strands of: AD-40056.1 (SEQ ID NOs: 423 and 850), or a modified or unmodified variant thereof.

[2660] A RNAi agent comprising a first and a second strand, wherein the sequences of the first and/or second strands are the sequences of the first and/or second strands of: AD-40062.1 (SEQ ID NOs: 424 and 851), or a modified or unmodified variant thereof.

[2661] A RNAi agent comprising a first and a second strand, wherein the sequences of the first and/or second strands are the sequences of the first and/or second strands of: AD-40068.1 (SEQ ID NOs: 425 and 852), or a modified or unmodified variant thereof.

[2662] A RNAi agent comprising a first and a second strand, wherein the sequences of the first and/or second strands are the sequences of the first and/or second strands of: AD-40074.1 (SEQ ID NOs: 426 and 853), or a modified or unmodified variant thereof.

[2663] A RNAi agent comprising a first and a second strand, wherein the sequences of the first and/or second strands are the sequences of the first and/or second strands of: AD-40080.1 (SEQ ID NOs: 427 and 854), or a modified or unmodified variant thereof.

[2664] A RNAi agent comprising a first and a second strand, wherein the sequences of the first and/or second strands are the sequences of the first and/or second strands of: AD-39720.1 (SEQ ID NOs: 1716 and 1754), or a modified or unmodified variant thereof.

[2665] A RNAi agent comprising a first and a second strand, wherein the sequences of the first and/or second strands are the sequences of the first and/or second strands of: AD-39706.1 (SEQ ID NOs: 1717 and 1755), or a modified or unmodified variant thereof.

[2666] A RNAi agent comprising a first and a second strand, wherein the sequences of the first and/or second strands are the sequences of the first and/or second strands of: AD-39712.1 (SEQ ID NOs: 1718 and 1756), or a modified or unmodified variant thereof.

[2667] A RNAi agent comprising a first and a second strand, wherein the sequences of the first and/or second strands are the sequences of the first and/or second strands of: AD-39760.1 (SEQ ID NOs: 1719 and 1757), or a modified or unmodified variant thereof.

[2668] A RNAi agent comprising a first and a second strand, wherein the sequences of the first and/or second strands are the sequences of the first and/or second strands of: AD-39732.1 (SEQ ID NOs: 1720 and 1758), or a modified or unmodified variant thereof.

[2669] A RNAi agent comprising a first and a second strand, wherein the sequences of the first and/or second strands are the sequences of the first and/or second strands of: AD-35541.4 (SEQ ID NOs: 1721 and 1759), or a modified or unmodified variant thereof.

[2670] A RNAi agent comprising a first and a second strand, wherein the sequences of the first and/or second strands are the sequences of the first and/or second strands of: AD-39735.1 or hs_KRAS_{—}321_A22S26 (SEQ ID NOs: 1722 and 1760), or a modified or unmodified variant thereof.

[2671] A RNAi agent comprising a first and a second strand, wherein the sequences of the first and/or second strands are the sequences of the first and/or second strands of: AD-39741.1, or modified or unmodified variants thereof.

[2672] A RNAi agent comprising a first and a second strand, wherein the sequences of the first and/or second strands are the sequences of the first and/or second strands of: hs_KRAS_{—} 322_A22S26 (SEQ ID NOs: 1723 and 1761), or a modified or unmodified variant thereof.

[2673] A RNAi agent comprising a first and a second strand, wherein the sequences of the first and/or second strands are the sequences of the first and/or second strands of: AD-39778.1 (SEQ ID NOs: 1724 and 1762), or a modified or unmodified variant thereof.

[2674] A RNAi agent comprising a first and a second strand, wherein the sequences of the first and/or second strands are the sequences of the first and/or second strands of: AD-39790.1 (SEQ ID NOs: 1725 and 1763), or a modified or unmodified variant thereof.

[2675] A RNAi agent comprising a first and a second strand, wherein the sequences of the first and/or second strands are the sequences of the first and/or second strands of: AD-39822.1 (SEQ ID NOs: 1726 and 1764), or a modified or unmodified variant thereof.

[2676] A RNAi agent comprising a first and a second strand, wherein the sequences of the first and/or second strands are the sequences of the first and/or second strands of: AD-35609.4 (SEQ ID NOs: 1727 and 1765), or a modified or unmodified variant thereof.

[2677] A RNAi agent comprising a first and a second strand, wherein the sequences of the first and/or second strands are the sequences of the first and/or second strands of: AD-35581.4 (SEQ ID NOs: 1728 and 1766), or a modified or unmodified variant thereof.

[2678] A RNAi agent comprising a first and a second strand, wherein the sequences of the first and/or second strands are the sequences of the first and/or second strands of: AD-39845.1 (SEQ ID NOs: 1729 and 1767), or a modified or unmodified variant thereof.

[2679] A RNAi agent comprising a first and a second strand, wherein the sequences of the first and/or second strands are the sequences of the first and/or second strands of: AD-39858.1 (SEQ ID NOs: 1730 and 1768), or a modified or unmodified variant thereof.

[2680] A RNAi agent comprising a first and a second strand, wherein the sequences of the first and/or second strands are the sequences of the first and/or second strands of: AD-39870.1 (SEQ ID NOs: 1731 and 1769), or a modified or unmodified variant thereof.

[2681] A RNAi agent comprising a first and a second strand, wherein the sequences of the first and/or second strands are the sequences of the first and/or second strands of: AD-35576.4 (SEQ ID NOs: 1732 and 1770), or a modified or unmodified variant thereof.

[2682] A RNAi agent comprising a first and a second strand, wherein the sequences of the first and/or second strands are the sequences of the first and/or second strands of: AD-35588.4 (SEQ ID NOs: 1733 and 1771), or a modified or unmodified variant thereof.

[2683] A RNAi agent comprising a first and a second strand, wherein the sequences of the first and/or second strands are the sequences of the first and/or second strands of: AD-35600.1 (SEQ ID NOs: 1734 and 1772), or a modified or unmodified variant thereof.

[2684] A RNAi agent comprising a first and a second strand, wherein the sequences of the first and/or second strands are the sequences of the first and/or second strands of: AD-35606.1 (SEQ ID NOs: 1735 and 1773), or a modified or unmodified variant thereof.

[2685] A RNAi agent comprising a first and a second strand, wherein the sequences of the first and/or second strands are the sequences of the first and/or second strands of: AD-38151.1 (SEQ ID NOs: 1736 and 1774), or a modified or unmodified variant thereof.

[2686] A RNAi agent comprising a first and a second strand, wherein the sequences of the first and/or second strands are the sequences of the first and/or second strands of: AD-38163.1 (SEQ ID NOs: 1737 and 1775), or a modified or unmodified variant thereof.

[2687] A RNAi agent comprising a first and a second strand, wherein the sequences of the first and/or second strands are the sequences of the first and/or second strands of: AD-39999.1 (SEQ ID NOs: 1738 and 1776), or a modified or unmodified variant thereof.

[2688] A RNAi agent comprising a first and a second strand, wherein the sequences of the first and/or second strands are the sequences of the first and/or second strands of: AD-38159.1 or hs_KRAS_{—}528_A22S26 (SEQ ID NOs: 1739 and 1777), or a modified or unmodified variant thereof.

[2689] A RNAi agent comprising a first and a second strand, wherein the sequences of the first and/or second strands are the sequences of the first and/or second strands of: AD-38130.1 or hs_KRAS_{—}531_A22S26 (SEQ ID NOs: 1740 and 1778), or a modified or unmodified variant thereof.

[2690] A RNAi agent comprising a first and a second strand, wherein the sequences of the first and/or second strands are the sequences of the first and/or second strands of: AD-38136.1 (SEQ ID NOs: 1741 and 1779), or a modified or unmodified variant thereof.

[2691] A RNAi agent comprising a first and a second strand, wherein the sequences of the first and/or second strands are the sequences of the first and/or second strands of: AD-40036.1 (SEQ ID NOs: 1742 and 1780), or a modified or unmodified variant thereof.

[2692] A RNAi agent comprising a first and a second strand, wherein the sequences of the first and/or second strands are the sequences of the first and/or second strands of: AD-40008.1 (SEQ ID NOs: 1743 and 1781), or a modified or unmodified variant thereof.

[2693] A RNAi agent comprising a first and a second strand, wherein the sequences of the first and/or second strands are the sequences of the first and/or second strands of: AD-40021.1 (SEQ ID NOs: 1744 and 1782), or a modified or unmodified variant thereof.

[2694] A RNAi agent comprising a first and a second strand, wherein the sequences of the first and/or second strands are the sequences of the first and/or second strands of: AD-40077.1 (SEQ ID NOs: 1745 and 1783), or a modified or unmodified variant thereof.

[2695] A RNAi agent comprising a first and a second strand, wherein the sequences of the first and/or second strands are the sequences of the first and/or second strands of: AD-40072.1 (SEQ ID NOs: 1746 and 1784), or a modified or unmodified variant thereof.

[2696] A RNAi agent comprising a first and a second strand, wherein the sequences of the first and/or second strands are the sequences of the first and/or second strands of: AD-40061.1 (SEQ ID NOs: 1747 and 1785), or a modified or unmodified variant thereof.

[2697] A RNAi agent comprising a first and a second strand, wherein the sequences of the first and/or second strands are the sequences of the first and/or second strands of: AD-40068.1 (SEQ ID NOs: 1748 and 1786), or a modified or unmodified variant thereof.

[2698] A RNAi agent comprising a first and a second strand, wherein the sequences of the first and/or second strands are the sequences of the first and/or second strands of: AD-38131.1 (SEQ ID NOs: 1749 and 1787), or a modified or unmodified variant thereof.

[2699] A RNAi agent comprising a first and a second strand, wherein the sequences of the first and/or second strands are the sequences of the first and/or second strands of: AD-38167.1 (SEQ ID NOs: 1750 and 1788), or a modified or unmodified variant thereof.

[2700] A RNAi agent comprising a first and a second strand, wherein the sequences of the first and/or second strands are the sequences of the first and/or second strands of: hs_KRAS 1273_A22S26 (SEQ ID NOs: 1751 and 1789), or a modified or unmodified variant thereof.

[2701] A RNAi agent comprising a first and a second strand, wherein the sequences of the first and/or second strands are the sequences of the first and/or second strands of: hs_KRAS 2892_A37S26 (SEQ ID NOs: 1752 and 1790), or a modified or unmodified variant thereof.

[2702] A RNAi agent comprising a first and a second strand, wherein the sequences of the first and/or second strands are the sequences of the first and/or second strands of: hs_KRAS 4731_A22S26 (SEQ ID NOs: 1753 and 1791), or a modified or unmodified variant thereof.

[2703] Specific embodiments wherein the sequences of the first and/or second strands are the sequences of the first and/or second strand of a RNAi agent disclosed herein, further comprising up to about 20 additional nucleotides

[2704] In one embodiment, the present disclosure pertains to a composition comprising any one or more of: a RNAi agent comprising a first and a second strand, wherein the sequence of the first and/or second strand is the sequence of a first and/or second strand of any RNAi agent from any of Tables 1 to 6, or modified and unmodified variants thereof, wherein the first and/or second strand further comprise up to about 20 additional nucleotides, wherein the first and/or second strand further comprise up to about 20 additional nucleotides.

[2705] Thus, in various embodiments, the present disclosure pertains to a composition comprising any one or more of the following:

[2706] A RNAi agent comprising a first and a second strand, wherein the sequence of the first and/or second strand is the sequence of a first and/or second strand of: AD-35523.3 (SEQ ID NOs: 1 and 428), or modified or unmodified variants thereof, wherein the first and/or second strand further comprise up to about 20 additional nucleotides.

[2707] A RNAi agent comprising a first and a second strand, wherein the sequence of the first and/or second strand is the sequence of a first and/or second strand of: AD-35529.1 (SEQ ID NOs: 2 and 429), or modified or unmodified variants thereof, wherein the first and/or second strand further comprise up to about 20 additional nucleotides.

[2708] A RNAi agent comprising a first and a second strand, wherein the sequence of the first and/or second strand is the sequence of a first and/or second strand of: AD-35535.4 (SEQ ID NOs: 3 and 430), or modified or unmodified variants thereof, wherein the first and/or second strand further comprise up to about 20 additional nucleotides.

[2709] A RNAi agent comprising a first and a second strand, wherein the sequence of the first and/or second strand is the sequence of a first and/or second strand of: AD-35541.4 (SEQ ID NOs: 4 and 431), or modified or unmodified variants thereof, wherein the first and/or second strand further comprise up to about 20 additional nucleotides.

[2710] A RNAi agent comprising a first and a second strand, wherein the sequence of the first and/or second strand is the sequence of a first and/or second strand of: AD-35547.4 (SEQ ID NOs: 5 and 432), or modified or unmodified variants thereof, wherein the first and/or second strand further comprise up to about 20 additional nucleotides.

[2711] A RNAi agent comprising a first and a second strand, wherein the sequence of the first and/or second strand is the sequence of a first and/or second strand of: AD-35553.4 (SEQ ID NOs: 6 and 433), or modified or unmodified variants thereof, wherein the first and/or second strand further comprise up to about 20 additional nucleotides.

[2712] A RNAi agent comprising a first and a second strand, wherein the sequence of the first and/or second strand is the sequence of a first and/or second strand of: AD-35559.4 (SEQ ID NOs: 7 and 434), or modified or unmodified variants thereof, wherein the first and/or second strand further comprise up to about 20 additional nucleotides.

[2713] A RNAi agent comprising a first and a second strand, wherein the sequence of the first and/or second strand is the sequence of a first and/or second strand of: AD-35565.4 (SEQ ID NOs: 8 and 435), or modified or unmodified variants thereof, wherein the first and/or second strand further comprise up to about 20 additional nucleotides.

[2714] A RNAi agent comprising a first and a second strand, wherein the sequence of the first and/or second strand is the sequence of a first and/or second strand of: AD-35524.4 (SEQ ID NOs: 9 and 436), or modified or unmodified variants thereof, wherein the first and/or second strand further comprise up to about 20 additional nucleotides.

[2715] A RNAi agent comprising a first and a second strand, wherein the sequence of the first and/or second strand is the sequence of a first and/or second strand of: AD-35530.4 (SEQ ID NOs: and 437), or modified or unmodified variants thereof, wherein the first and/or second strand further comprise up to about 20 additional nucleotides.

[2716] A RNAi agent comprising a first and a second strand, wherein the sequence of the first and/or second strand is the sequence of a first and/or second strand of: AD-35536.4 (SEQ ID NOs: 11 and 438), or modified or unmodified variants thereof, wherein the first and/or second strand further comprise up to about 20 additional nucleotides.

[2717] A RNAi agent comprising a first and a second strand, wherein the sequence of the first and/or second strand is the sequence of a first and/or second strand of: AD-35542.4 (SEQ ID NOs: 12 and 439), or modified or unmodified variants thereof, wherein the first and/or second strand further comprise up to about 20 additional nucleotides.

[2718] A RNAi agent comprising a first and a second strand, wherein the sequence of the first and/or second strand is the sequence of a first and/or second strand of: AD-35548.4 (SEQ ID NOs: 13 and 440), or modified or unmodified variants thereof, wherein the first and/or second strand further comprise up to about 20 additional nucleotides.

[2719] A RNAi agent comprising a first and a second strand, wherein the sequence of the first and/or second strand is the sequence of a first and/or second strand of: AD-35554.4 (SEQ ID NOs: 14 and 441), or modified or unmodified variants thereof, wherein the first and/or second strand further comprise up to about 20 additional nucleotides.

[2720] A RNAi agent comprising a first and a second strand, wherein the sequence of the first and/or second strand is the sequence of a first and/or second strand of: AD-35560.2 (SEQ ID NOs: 15 and 442), or modified or unmodified variants thereof, wherein the first and/or second strand further comprise up to about 20 additional nucleotides.

[2721] A RNAi agent comprising a first and a second strand, wherein the sequence of the first and/or second strand is the sequence of a first and/or second strand of: AD-35566.4 (SEQ ID NOs: 16 and 443), or modified or unmodified variants thereof, wherein the first and/or second strand further comprise up to about 20 additional nucleotides.

[2722] A RNAi agent comprising a first and a second strand, wherein the sequence of the first and/or second strand is the sequence of a first and/or second strand of: AD-35525.2 (SEQ ID NOs: 17 and 444), or modified or unmodified variants thereof, wherein the first and/or second strand further comprise up to about 20 additional nucleotides.

[2723] A RNAi agent comprising a first and a second strand, wherein the sequence of the first and/or second strand is the sequence of a first and/or second strand of: AD-35531.4 (SEQ ID NOs: 18 and 445), or modified or unmodified variants thereof, wherein the first and/or second strand

[2724] A RNAi agent comprising a first and a second strand, wherein the sequence of the first and/or second strand is the sequence of a first and/or second strand of: AD-35537.4 (SEQ ID NOs: 19 and 446), or modified or unmodified variants thereof, wherein the first and/or second strand further comprise up to about 20 additional nucleotides.

[2725] A RNAi agent comprising a first and a second strand, wherein the sequence of the first and/or second strand is the sequence of a first and/or second strand of: AD-35543.2 (SEQ ID NOs: 20 and 447), or modified or unmodified variants thereof, wherein the first and/or second strand further comprise up to about 20 additional nucleotides.

[2726] A RNAi agent comprising a first and a second strand, wherein the sequence of the first and/or second strand is the sequence of a first and/or second strand of: AD-35549.4 (SEQ ID NOs: 21 and 448), or modified or unmodified variants thereof, wherein the first and/or second strand further comprise up to about 20 additional nucleotides.

[2727] A RNAi agent comprising a first and a second strand, wherein the sequence of the first and/or second strand is the sequence of a first and/or second strand of: AD-35555.4 (SEQ ID NOs: 22 and 449), or modified or unmodified variants thereof, wherein the first and/or second strand further comprise up to about 20 additional nucleotides.

[2728] A RNAi agent comprising a first and a second strand, wherein the sequence of the first and/or second strand is the sequence of a first and/or second strand of: AD-35561.4 (SEQ ID NOs: 23 and 450), or modified or unmodified variants thereof, wherein the first and/or second strand further comprise up to about 20 additional nucleotides.

[2729] A RNAi agent comprising a first and a second strand, wherein the sequence of the first and/or second strand is the sequence of a first and/or second strand of: AD-35567.4 (SEQ ID NOs: 24 and 451), or modified or unmodified variants thereof, wherein the first and/or second strand further comprise up to about 20 additional nucleotides.

[2730] A RNAi agent comprising a first and a second strand, wherein the sequence of the first and/or second strand is the sequence of a first and/or second strand of: AD-35526.4 (SEQ ID NOs: 25 and 452), or modified or unmodified variants thereof, wherein the first and/or second strand further comprise up to about 20 additional nucleotides.

[2731] A RNAi agent comprising a first and a second strand, wherein the sequence of the first and/or second strand is the sequence of a first and/or second strand of: AD-35532.4 (SEQ ID NOs: 26 and 453), or modified or unmodified variants thereof, wherein the first and/or second strand further comprise up to about 20 additional nucleotides.

[2732] A RNAi agent comprising a first and a second strand, wherein the sequence of the first and/or second strand is the sequence of a first and/or second strand of: AD-35538.4 (SEQ ID NOs: 27 and 454), or modified or unmodified variants thereof, wherein the first and/or second strand further comprise up to about 20 additional nucleotides.

[2733] A RNAi agent comprising a first and a second strand, wherein the sequence of the first and/or second strand is the sequence of a first and/or second strand of: AD-35544.4 (SEQ ID NOs: 28 and 455), or modified or unmodified variants thereof, wherein the first and/or second strand

[2734] A RNAi agent comprising a first and a second strand, wherein the sequence of the first and/or second strand is the sequence of a first and/or second strand of: AD-35550.4 (SEQ ID NOs: 29 and 456), or modified or unmodified variants thereof, wherein the first and/or second strand further comprise up to about 20 additional nucleotides.

[2735] A RNAi agent comprising a first and a second strand, wherein the sequence of the first and/or second strand is the sequence of a first and/or second strand of: AD-35556.4 (SEQ ID NOs: 30 and 457), or modified or unmodified variants thereof, wherein the first and/or second strand further comprise up to about 20 additional nucleotides.

[2736] A RNAi agent comprising a first and a second strand, wherein the sequence of the first and/or second strand is the sequence of a first and/or second strand of: AD-35562.4 (SEQ ID NOs: 31 and 458), or modified or unmodified variants thereof, wherein the first and/or second strand further comprise up to about 20 additional nucleotides.

[2737] A RNAi agent comprising a first and a second strand, wherein the sequence of the first and/or second strand is the sequence of a first and/or second strand of: AD-35568.4 (SEQ ID NOs: 32 and 459), or modified or unmodified variants thereof, wherein the first and/or second strand further comprise up to about 20 additional nucleotides.

[2738] A RNAi agent comprising a first and a second strand, wherein the sequence of the first and/or second strand is the sequence of a first and/or second strand of: AD-35527.4 (SEQ ID NOs: 33 and 460), or modified or unmodified variants thereof, wherein the first and/or second strand further comprise up to about 20 additional nucleotides.

[2739] A RNAi agent comprising a first and a second strand, wherein the sequence of the first and/or second strand is the sequence of a first and/or second strand of: AD-35533.4 (SEQ ID NOs: 34 and 461), or modified or unmodified variants thereof, wherein the first and/or second strand further comprise up to about 20 additional nucleotides.

[2740] A RNAi agent comprising a first and a second strand, wherein the sequence of the first and/or second strand is the sequence of a first and/or second strand of: AD-35539.4 (SEQ ID NOs: 35 and 462), or modified or unmodified variants thereof, wherein the first and/or second strand further comprise up to about 20 additional nucleotides.

[2741] A RNAi agent comprising a first and a second strand, wherein the sequence of the first and/or second strand is the sequence of a first and/or second strand of: AD-35545.4 (SEQ ID NOs: 36 and 463), or modified or unmodified variants thereof, wherein the first and/or second strand further comprise up to about 20 additional nucleotides.

[2742] A RNAi agent comprising a first and a second strand, wherein the sequence of the first and/or second strand is the sequence of a first and/or second strand of: AD-35551.4 (SEQ ID NOs: 37 and 464), or modified or unmodified variants thereof, wherein the first and/or second strand further comprise up to about 20 additional nucleotides.

[2743] A RNAi agent comprising a first and a second strand, wherein the sequence of the first and/or second strand is the sequence of a first and/or second strand of: AD-35563.4 (SEQ ID NOs: 38 and 465), or modified or unmodified variants thereof, wherein the first and/or second strand further comprise up to about 20 additional nucleotides.

[2744] A RNAi agent comprising a first and a second strand, wherein the sequence of the first and/or second strand is the sequence of a first and/or second strand of: AD-35528.4 (SEQ ID NOs: 39 and 466), or modified or unmodified variants thereof, wherein the first and/or second strand further comprise up to about 20 additional nucleotides.

[2745] A RNAi agent comprising a first and a second strand, wherein the sequence of the first and/or second strand is the sequence of a first and/or second strand of: AD-35540.4 (SEQ ID NOs: 40 and 467), or modified or unmodified variants thereof, wherein the first and/or second strand further comprise up to about 20 additional nucleotides.

[2746] A RNAi agent comprising a first and a second strand, wherein the sequence of the first and/or second strand is the sequence of a first and/or second strand of: AD-35546.4 (SEQ ID NOs: 41 and 468), or modified or unmodified variants thereof, wherein the first and/or second strand further comprise up to about 20 additional nucleotides.

[2747] A RNAi agent comprising a first and a second strand, wherein the sequence of the first and/or second strand is the sequence of a first and/or second strand of: AD-35552.4 (SEQ ID NOs: 42 and 469), or modified or unmodified variants thereof, wherein the first and/or second strand further comprise up to about 20 additional nucleotides.

[2748] A RNAi agent comprising a first and a second strand, wherein the sequence of the first and/or second strand is the sequence of a first and/or second strand of: AD-35558.4 (SEQ ID NOs: 43 and 470), or modified or unmodified variants thereof, wherein the first and/or second strand further comprise up to about 20 additional nucleotides.

[2749] A RNAi agent comprising a first and a second strand, wherein the sequence of the first and/or second strand is the sequence of a first and/or second strand of: AD-35564.4 (SEQ ID NOs: 44 and 471), or modified or unmodified variants thereof, wherein the first and/or second strand further comprise up to about 20 additional nucleotides.

[2750] A RNAi agent comprising a first and a second strand, wherein the sequence of the first and/or second strand is the sequence of a first and/or second strand of: AD-35570.4 (SEQ ID NOs: 45 and 472), or modified or unmodified variants thereof, wherein the first and/or second strand further comprise up to about 20 additional nucleotides.

[2751] A RNAi agent comprising a first and a second strand, wherein the sequence of the first and/or second strand is the sequence of a first and/or second strand of: AD-35571.4 (SEQ ID NOs: 46 and 473), or modified or unmodified variants thereof, wherein the first and/or second strand further comprise up to about 20 additional nucleotides.

[2752] A RNAi agent comprising a first and a second strand, wherein the sequence of the first and/or second strand is the sequence of a first and/or second strand of: AD-35577.4 (SEQ ID NOs: 47 and 474), or modified or unmodified variants thereof, wherein the first and/or second strand further comprise up to about 20 additional nucleotides.

[2753] A RNAi agent comprising a first and a second strand, wherein the sequence of the first and/or second strand is the sequence of a first and/or second strand of: AD-35583.4 (SEQ ID NOs: 48 and 475), or modified or unmodified variants thereof, wherein the first and/or second strand further comprise up to about 20 additional nucleotides.

[2754] A RNAi agent comprising a first and a second strand, wherein the sequence of the first and/or second strand is the sequence of a first and/or second strand of: AD-35589.4 (SEQ ID NOs: 49 and 476), or modified or unmodified variants thereof, wherein the first and/or second strand further comprise up to about 20 additional nucleotides.

[2755] A RNAi agent comprising a first and a second strand, wherein the sequence of the first and/or second strand is the sequence of a first and/or second strand of: AD-35595.4 (SEQ ID NOs: 50 and 477), or modified or unmodified variants thereof, wherein the first and/or second strand further comprise up to about 20 additional nucleotides.

[2756] A RNAi agent comprising a first and a second strand, wherein the sequence of the first and/or second strand is the sequence of a first and/or second strand of: AD-35601.4 (SEQ ID NOs: 51 and 478), or modified or unmodified variants thereof, wherein the first and/or second strand further comprise up to about 20 additional nucleotides.

[2757] A RNAi agent comprising a first and a second strand, wherein the sequence of the first and/or second strand is the sequence of a first and/or second strand of: AD-35607.4 (SEQ ID NOs: 52 and 479), or modified or unmodified variants thereof, wherein the first and/or second strand further comprise up to about 20 additional nucleotides.

[2758] A RNAi agent comprising a first and a second strand, wherein the sequence of the first and/or second strand is the sequence of a first and/or second strand of: AD-35613.4 (SEQ ID NOs: 53 and 480), or modified or unmodified variants thereof, wherein the first and/or second strand further comprise up to about 20 additional nucleotides.

[2759] A RNAi agent comprising a first and a second strand, wherein the sequence of the first and/or second strand is the sequence of a first and/or second strand of: AD-35572.4 (SEQ ID NOs: 54 and 481), or modified or unmodified variants thereof, wherein the first and/or second strand further comprise up to about 20 additional nucleotides.

[2760] A RNAi agent comprising a first and a second strand, wherein the sequence of the first and/or second strand is the sequence of a first and/or second strand of: AD-35578.4 (SEQ ID NOs: 55 and 482), or modified or unmodified variants thereof, wherein the first and/or second strand further comprise up to about 20 additional nucleotides.

[2761] A RNAi agent comprising a first and a second strand, wherein the sequence of the first and/or second strand is the sequence of a first and/or second strand of: AD-35584.4 (SEQ ID NOs: 56 and 483), or modified or unmodified variants thereof, wherein the first and/or second strand further comprise up to about 20 additional nucleotides.

[2762] A RNAi agent comprising a first and a second strand, wherein the sequence of the first and/or second strand is the sequence of a first and/or second strand of: AD-35590.4 (SEQ ID NOs: 57 and 484), or modified or unmodified variants thereof, wherein the first and/or second strand further comprise up to about 20 additional nucleotides.

[2763] A RNAi agent comprising a first and a second strand, wherein the sequence of the first and/or second strand is the sequence of a first and/or second strand of: AD-35596.4 (SEQ ID NOs: 58 and 485), or modified or unmodified variants thereof, wherein the first and/or second strand further comprise up to about 20 additional nucleotides.

[2764] A RNAi agent comprising a first and a second strand, wherein the sequence of the first and/or second strand is the sequence of a first and/or second strand of: AD-35602.4 (SEQ ID NOs: 59 and 486), or modified or unmodified variants thereof, wherein the first and/or second strand

[2765] A RNAi agent comprising a first and a second strand, wherein the sequence of the first and/or second strand is the sequence of a first and/or second strand of: AD-35608.4 (SEQ ID NOs: 60 and 487), or modified or unmodified variants thereof, wherein the first and/or second strand further comprise up to about 20 additional nucleotides.

[2766] A RNAi agent comprising a first and a second strand, wherein the sequence of the first and/or second strand is the sequence of a first and/or second strand of: AD-35614.4 (SEQ ID NOs: 61 and 488), or modified or unmodified variants thereof, wherein the first and/or second strand further comprise up to about 20 additional nucleotides.

[2767] A RNAi agent comprising a first and a second strand, wherein the sequence of the first and/or second strand is the sequence of a first and/or second strand of: AD-35573.4 (SEQ ID NOs: 62 and 489), or modified or unmodified variants thereof, wherein the first and/or second strand further comprise up to about 20 additional nucleotides.

[2768] A RNAi agent comprising a first and a second strand, wherein the sequence of the first and/or second strand is the sequence of a first and/or second strand of: AD-35579.4 (SEQ ID NOs: 63 and 490), or modified or unmodified variants thereof, wherein the first and/or second strand further comprise up to about 20 additional nucleotides.

[2769] A RNAi agent comprising a first and a second strand, wherein the sequence of the first and/or second strand is the sequence of a first and/or second strand of: AD-35585.4 (SEQ ID NOs: 64 and 491), or modified or unmodified variants thereof, wherein the first and/or second strand further comprise up to about 20 additional nucleotides.

[2770] A RNAi agent comprising a first and a second strand, wherein the sequence of the first and/or second strand is the sequence of a first and/or second strand of: AD-35591.4 (SEQ ID NOs: 65 and 492), or modified or unmodified variants thereof, wherein the first and/or second strand further comprise up to about 20 additional nucleotides.

[2771] A RNAi agent comprising a first and a second strand, wherein the sequence of the first and/or second strand is the sequence of a first and/or second strand of: AD-35597.4 (SEQ ID NOs: 66 and 493), or modified or unmodified variants thereof, wherein the first and/or second strand further comprise up to about 20 additional nucleotides.

[2772] A RNAi agent comprising a first and a second strand, wherein the sequence of the first and/or second strand is the sequence of a first and/or second strand of: AD-35603.4 (SEQ ID NOs: 67 and 494), or modified or unmodified variants thereof, wherein the first and/or second strand further comprise up to about 20 additional nucleotides.

[2773] A RNAi agent comprising a first and a second strand, wherein the sequence of the first and/or second strand is the sequence of a first and/or second strand of: AD-35609.4 (SEQ ID NOs: 68 and 495), or modified or unmodified variants thereof, wherein the first and/or second strand further comprise up to about 20 additional nucleotides.

[2774] A RNAi agent comprising a first and a second strand, wherein the sequence of the first and/or second strand is the sequence of a first and/or second strand of: AD-35615.4 (SEQ ID NOs: 69 and 496), or modified or unmodified variants thereof, wherein the first and/or second strand

[2775] A RNAi agent comprising a first and a second strand, wherein the sequence of the first and/or second strand is the sequence of a first and/or second strand of: AD-35574.4 (SEQ ID NOs: 70 and 497), or modified or unmodified variants thereof, wherein the first and/or second strand further comprise up to about 20 additional nucleotides.

[2776] A RNAi agent comprising a first and a second strand, wherein the sequence of the first and/or second strand is the sequence of a first and/or second strand of: AD-35580.1 (SEQ ID NOs: 71 and 498), or modified or unmodified variants thereof, wherein the first and/or second strand further comprise up to about 20 additional nucleotides.

[2777] A RNAi agent comprising a first and a second strand, wherein the sequence of the first and/or second strand is the sequence of a first and/or second strand of: AD-35586.4 (SEQ ID NOs: 72 and 499), or modified or unmodified variants thereof, wherein the first and/or second strand further comprise up to about 20 additional nucleotides.

[2778] A RNAi agent comprising a first and a second strand, wherein the sequence of the first and/or second strand is the sequence of a first and/or second strand of: AD-35592.4 (SEQ ID NOs: 73 and 500), or modified or unmodified variants thereof, wherein the first and/or second strand further comprise up to about 20 additional nucleotides.

[2779] A RNAi agent comprising a first and a second strand, wherein the sequence of the first and/or second strand is the sequence of a first and/or second strand of: AD-35598.4 (SEQ ID NOs: 74 and 501), or modified or unmodified variants thereof, wherein the first and/or second strand further comprise up to about 20 additional nucleotides.

[2780] A RNAi agent comprising a first and a second strand, wherein the sequence of the first and/or second strand is the sequence of a first and/or second strand of: AD-35604.4 (SEQ ID NOs: 75 and 502), or modified or unmodified variants thereof, wherein the first and/or second strand further comprise up to about 20 additional nucleotides.

[2781] A RNAi agent comprising a first and a second strand, wherein the sequence of the first and/or second strand is the sequence of a first and/or second strand of: AD-35610.4 (SEQ ID NOs: 76 and 503), or modified or unmodified variants thereof, wherein the first and/or second strand further comprise up to about 20 additional nucleotides.

[2782] A RNAi agent comprising a first and a second strand, wherein the sequence of the first and/or second strand is the sequence of a first and/or second strand of: AD-35616.4 (SEQ ID NOs: 77 and 504), or modified or unmodified variants thereof, wherein the first and/or second strand further comprise up to about 20 additional nucleotides.

[2783] A RNAi agent comprising a first and a second strand, wherein the sequence of the first and/or second strand is the sequence of a first and/or second strand of: AD-35575.4 (SEQ ID NOs: 78 and 505), or modified or unmodified variants thereof, wherein the first and/or second strand further comprise up to about 20 additional nucleotides.

[2784] A RNAi agent comprising a first and a second strand, wherein the sequence of the first and/or second strand is the sequence of a first and/or second strand of: AD-35581.4 (SEQ ID NOs: 79 and 506), or modified or unmodified variants thereof, wherein the first and/or second strand further comprise up to about 20 additional nucleotides.

[2785] A RNAi agent comprising a first and a second strand, wherein the sequence of the first and/or second strand is the sequence of a first and/or second strand of: AD-35587.4 (SEQ ID NOs: 80 and 507), or modified or unmodified variants thereof, wherein the first and/or second strand further comprise up to about 20 additional nucleotides.

[2786] A RNAi agent comprising a first and a second strand, wherein the sequence of the first and/or second strand is the sequence of a first and/or second strand of: AD-35593.4 (SEQ ID NOs: 81 and 508), or modified or unmodified variants thereof, wherein the first and/or second strand further comprise up to about 20 additional nucleotides.

[2787] A RNAi agent comprising a first and a second strand, wherein the sequence of the first and/or second strand is the sequence of a first and/or second strand of: AD-35599.4 (SEQ ID NOs: 82 and 509), or modified or unmodified variants thereof, wherein the first and/or second strand further comprise up to about 20 additional nucleotides.

[2788] A RNAi agent comprising a first and a second strand, wherein the sequence of the first and/or second strand is the sequence of a first and/or second strand of: AD-35605.4 (SEQ ID NOs: 83 and 510), or modified or unmodified variants thereof, wherein the first and/or second strand further comprise up to about 20 additional nucleotides.

[2789] A RNAi agent comprising a first and a second strand, wherein the sequence of the first and/or second strand is the sequence of a first and/or second strand of: AD-35611.4 (SEQ ID NOs: 84 and 511), or modified or unmodified variants thereof, wherein the first and/or second strand further comprise up to about 20 additional nucleotides.

[2790] A RNAi agent comprising a first and a second strand, wherein the sequence of the first and/or second strand is the sequence of a first and/or second strand of: AD-35617.4 (SEQ ID NOs: 85 and 512), or modified or unmodified variants thereof, wherein the first and/or second strand further comprise up to about 20 additional nucleotides.

[2791] A RNAi agent comprising a first and a second strand, wherein the sequence of the first and/or second strand is the sequence of a first and/or second strand of: AD-35576.4 (SEQ ID NOs: 86 and 513), or modified or unmodified variants thereof, wherein the first and/or second strand further comprise up to about 20 additional nucleotides.

[2792] A RNAi agent comprising a first and a second strand, wherein the sequence of the first and/or second strand is the sequence of a first and/or second strand of: AD-35588.4 (SEQ ID NOs: 87 and 514), or modified or unmodified variants thereof, wherein the first and/or second strand further comprise up to about 20 additional nucleotides.

[2793] A RNAi agent comprising a first and a second strand, wherein the sequence of the first and/or second strand is the sequence of a first and/or second strand of: AD-35667.1 (SEQ ID NOs: 88 and 515), or modified or unmodified variants thereof, wherein the first and/or second strand further comprise up to about 20 additional nucleotides.

[2794] A RNAi agent comprising a first and a second strand, wherein the sequence of the first and/or second strand is the sequence of a first and/or second strand of: AD-35673.1 (SEQ ID NOs: 89 and 516), or modified or unmodified variants thereof, wherein the first and/or second strand further comprise up to about 20 additional nucleotides.

[2795] A RNAi agent comprising a first and a second strand, wherein the sequence of the first and/or second strand is the sequence of a first and/or second strand of: AD-35679.1 (SEQ ID NOs: 90 and 517), or modified or unmodified variants thereof, wherein the first and/or second strand further comprise up to about 20 additional nucleotides.

[2796] A RNAi agent comprising a first and a second strand, wherein the sequence of the first and/or second strand is the sequence of a first and/or second strand of: AD-35685.1 (SEQ ID NOs: 91 and 518), or modified or unmodified variants thereof, wherein the first and/or second strand further comprise up to about 20 additional nucleotides.

[2797] A RNAi agent comprising a first and a second strand, wherein the sequence of the first and/or second strand is the sequence of a first and/or second strand of: AD-35691.1 (SEQ ID NOs: 92 and 519), or modified or unmodified variants thereof, wherein the first and/or second strand further comprise up to about 20 additional nucleotides.

[2798] A RNAi agent comprising a first and a second strand, wherein the sequence of the first and/or second strand is the sequence of a first and/or second strand of: AD-35557.1 (SEQ ID NOs: 93 and 520), or modified or unmodified variants thereof, wherein the first and/or second strand further comprise up to about 20 additional nucleotides.

[2799] A RNAi agent comprising a first and a second strand, wherein the sequence of the first and/or second strand is the sequence of a first and/or second strand of: AD-35618.1 (SEQ ID NOs: 94 and 521), or modified or unmodified variants thereof, wherein the first and/or second strand further comprise up to about 20 additional nucleotides.

[2800] A RNAi agent comprising a first and a second strand, wherein the sequence of the first and/or second strand is the sequence of a first and/or second strand of: AD-35569.1 (SEQ ID NOs: 95 and 522), or modified or unmodified variants thereof, wherein the first and/or second strand further comprise up to about 20 additional nucleotides.

[2801] A RNAi agent comprising a first and a second strand, wherein the sequence of the first and/or second strand is the sequence of a first and/or second strand of: AD-35534.1 (SEQ ID NOs: 96 and 523), or modified or unmodified variants thereof, wherein the first and/or second strand further comprise up to about 20 additional nucleotides.

[2802] A RNAi agent comprising a first and a second strand, wherein the sequence of the first and/or second strand is the sequence of a first and/or second strand of: AD-35582.1 (SEQ ID NOs: 97 and 524), or modified or unmodified variants thereof, wherein the first and/or second strand further comprise up to about 20 additional nucleotides.

[2803] A RNAi agent comprising a first and a second strand, wherein the sequence of the first and/or second strand is the sequence of a first and/or second strand of: AD-35594.1 (SEQ ID NOs: 98 and 525), or modified or unmodified variants thereof, wherein the first and/or second strand further comprise up to about 20 additional nucleotides.

[2804] A RNAi agent comprising a first and a second strand, wherein the sequence of the first and/or second strand is the sequence of a first and/or second strand of: AD-35600.1 (SEQ ID NOs: 99 and 526), or modified or unmodified variants thereof, wherein the first and/or second strand further comprise up to about 20 additional nucleotides.

[2805] A RNAi agent comprising a first and a second strand, wherein the sequence of the first and/or second strand is the sequence of a first and/or second strand of: AD-35606.1 (SEQ ID NOs: 100 and 527), or modified or unmodified variants thereof, wherein the first and/or second strand

[2806] A RNAi agent comprising a first and a second strand, wherein the sequence of the first and/or second strand is the sequence of a first and/or second strand of: AD-35612.1 (SEQ ID NOs: 101 and 528), or modified or unmodified variants thereof, wherein the first and/or second strand further comprise up to about 20 additional nucleotides.

[2807] A RNAi agent comprising a first and a second strand, wherein the sequence of the first and/or second strand is the sequence of a first and/or second strand of: AD-38127.1 (SEQ ID NOs: 102 and 529), or modified or unmodified variants thereof, wherein the first and/or second strand further comprise up to about 20 additional nucleotides.

[2808] A RNAi agent comprising a first and a second strand, wherein the sequence of the first and/or second strand is the sequence of a first and/or second strand of: AD-38133.1 (SEQ ID NOs: 103 and 530), or modified or unmodified variants thereof, wherein the first and/or second strand further comprise up to about 20 additional nucleotides.

[2809] A RNAi agent comprising a first and a second strand, wherein the sequence of the first and/or second strand is the sequence of a first and/or second strand of: AD-38139.1 (SEQ ID NOs: 104 and 531), or modified or unmodified variants thereof, wherein the first and/or second strand further comprise up to about 20 additional nucleotides.

[2810] A RNAi agent comprising a first and a second strand, wherein the sequence of the first and/or second strand is the sequence of a first and/or second strand of: AD-38145.1 (SEQ ID NOs: 105 and 532), or modified or unmodified variants thereof, wherein the first and/or second strand further comprise up to about 20 additional nucleotides.

[2811] A RNAi agent comprising a first and a second strand, wherein the sequence of the first and/or second strand is the sequence of a first and/or second strand of: AD-38151.1 (SEQ ID NOs: 106 and 533), or modified or unmodified variants thereof, wherein the first and/or second strand further comprise up to about 20 additional nucleotides.

[2812] A RNAi agent comprising a first and a second strand, wherein the sequence of the first and/or second strand is the sequence of a first and/or second strand of: AD-38157.1 (SEQ ID NOs: 107 and 534), or modified or unmodified variants thereof, wherein the first and/or second strand further comprise up to about 20 additional nucleotides.

[2813] A RNAi agent comprising a first and a second strand, wherein the sequence of the first and/or second strand is the sequence of a first and/or second strand of: AD-38163.1 (SEQ ID NOs: 108 and 535), or modified or unmodified variants thereof, wherein the first and/or second strand further comprise up to about 20 additional nucleotides.

[2814] A RNAi agent comprising a first and a second strand, wherein the sequence of the first and/or second strand is the sequence of a first and/or second strand of: AD-38169.1 (SEQ ID NOs: 109 and 536), or modified or unmodified variants thereof, wherein the first and/or second strand further comprise up to about 20 additional nucleotides.

[2815] A RNAi agent comprising a first and a second strand, wherein the sequence of the first and/or second strand is the sequence of a first and/or second strand of: AD-38128.1 (SEQ ID NOs: 110 and 537), or modified or unmodified variants thereof, wherein the first and/or second strand

[2816] A RNAi agent comprising a first and a second strand, wherein the sequence of the first and/or second strand is the sequence of a first and/or second strand of: AD-38134.1 (SEQ ID NOs: 111 and 538), or modified or unmodified variants thereof, wherein the first and/or second strand further comprise up to about 20 additional nucleotides.

[2817] A RNAi agent comprising a first and a second strand, wherein the sequence of the first and/or second strand is the sequence of a first and/or second strand of: AD-38140.1 (SEQ ID NOs: 112 and 539), or modified or unmodified variants thereof, wherein the first and/or second strand further comprise up to about 20 additional nucleotides.

[2818] A RNAi agent comprising a first and a second strand, wherein the sequence of the first and/or second strand is the sequence of a first and/or second strand of: AD-38146.1 (SEQ ID NOs: 113 and 540), or modified or unmodified variants thereof, wherein the first and/or second strand further comprise up to about 20 additional nucleotides.

[2819] A RNAi agent comprising a first and a second strand, wherein the sequence of the first and/or second strand is the sequence of a first and/or second strand of: AD-38152.1 (SEQ ID NOs: 114 and 541), or modified or unmodified variants thereof, wherein the first and/or second strand further comprise up to about 20 additional nucleotides.

[2820] A RNAi agent comprising a first and a second strand, wherein the sequence of the first and/or second strand is the sequence of a first and/or second strand of: AD-38158.1 (SEQ ID NOs: 115 and 542), or modified or unmodified variants thereof, wherein the first and/or second strand further comprise up to about 20 additional nucleotides.

[2821] A RNAi agent comprising a first and a second strand, wherein the sequence of the first and/or second strand is the sequence of a first and/or second strand of: AD-38164.1 (SEQ ID NOs: 116 and 543), or modified or unmodified variants thereof, wherein the first and/or second strand further comprise up to about 20 additional nucleotides.

[2822] A RNAi agent comprising a first and a second strand, wherein the sequence of the first and/or second strand is the sequence of a first and/or second strand of: AD-38170.1 (SEQ ID NOs: 117 and 544), or modified or unmodified variants thereof, wherein the first and/or second strand further comprise up to about 20 additional nucleotides.

[2823] A RNAi agent comprising a first and a second strand, wherein the sequence of the first and/or second strand is the sequence of a first and/or second strand of: AD-38129.1 (SEQ ID NOs: 118 and 545), or modified or unmodified variants thereof, wherein the first and/or second strand further comprise up to about 20 additional nucleotides.

[2824] A RNAi agent comprising a first and a second strand, wherein the sequence of the first and/or second strand is the sequence of a first and/or second strand of: AD-38135.1 (SEQ ID NOs: 119 and 546), or modified or unmodified variants thereof, wherein the first and/or second strand further comprise up to about 20 additional nucleotides.

[2825] A RNAi agent comprising a first and a second strand, wherein the sequence of the first and/or second strand is the sequence of a first and/or second strand of: AD-38141.1 (SEQ ID NOs: 120 and 547), or modified or unmodified variants thereof, wherein the first and/or second strand further comprise up to about 20 additional nucleotides.

[2826] A RNAi agent comprising a first and a second strand, wherein the sequence of the first and/or second strand is the sequence of a first and/or second strand of: AD-38147.1 (SEQ ID NOs: 121 and 548), or modified or unmodified variants thereof, wherein the first and/or second strand further comprise up to about 20 additional nucleotides.

[2827] A RNAi agent comprising a first and a second strand, wherein the sequence of the first and/or second strand is the sequence of a first and/or second strand of: AD-38153.1 (SEQ ID NOs: 122 and 549), or modified or unmodified variants thereof, wherein the first and/or second strand further comprise up to about 20 additional nucleotides.

[2828] A RNAi agent comprising a first and a second strand, wherein the sequence of the first and/or second strand is the sequence of a first and/or second strand of: AD-38159.1 (SEQ ID NOs: 123 and 550), or modified or unmodified variants thereof, wherein the first and/or second strand further comprise up to about 20 additional nucleotides.

[2829] A RNAi agent comprising a first and a second strand, wherein the sequence of the first and/or second strand is the sequence of a first and/or second strand of: AD-38165.1 (SEQ ID NOs: 124 and 551), or modified or unmodified variants thereof, wherein the first and/or second strand further comprise up to about 20 additional nucleotides.

[2830] A RNAi agent comprising a first and a second strand, wherein the sequence of the first and/or second strand is the sequence of a first and/or second strand of: AD-38171.1 (SEQ ID NOs: 125 and 552), or modified or unmodified variants thereof, wherein the first and/or second strand further comprise up to about 20 additional nucleotides.

[2831] A RNAi agent comprising a first and a second strand, wherein the sequence of the first and/or second strand is the sequence of a first and/or second strand of: AD-38130.1 (SEQ ID NOs: 126 and 553), or modified or unmodified variants thereof, wherein the first and/or second strand further comprise up to about 20 additional nucleotides.

[2832] A RNAi agent comprising a first and a second strand, wherein the sequence of the first and/or second strand is the sequence of a first and/or second strand of: AD-38136.1 (SEQ ID NOs: 127 and 554), or modified or unmodified variants thereof, wherein the first and/or second strand further comprise up to about 20 additional nucleotides.

[2833] A RNAi agent comprising a first and a second strand, wherein the sequence of the first and/or second strand is the sequence of a first and/or second strand of: AD-38142.1 (SEQ ID NOs: 128 and 555), or modified or unmodified variants thereof, wherein the first and/or second strand further comprise up to about 20 additional nucleotides.

[2834] A RNAi agent comprising a first and a second strand, wherein the sequence of the first and/or second strand is the sequence of a first and/or second strand of: AD-38148.1 (SEQ ID NOs: 129 and 556), or modified or unmodified variants thereof, wherein the first and/or second strand further comprise up to about 20 additional nucleotides.

[2835] A RNAi agent comprising a first and a second strand, wherein the sequence of the first and/or second strand is the sequence of a first and/or second strand of: AD-38154.1 (SEQ ID NOs: 130 and 557), or modified or unmodified variants thereof, wherein the first and/or second strand further comprise up to about 20 additional nucleotides.

[2836] A RNAi agent comprising a first and a second strand, wherein the sequence of the first and/or second strand is the sequence of a first and/or second strand of: AD-38160.1 (SEQ ID NOs: 131 and 558), or modified or unmodified variants thereof, wherein the first and/or second strand further comprise up to about 20 additional nucleotides.

[2837] A RNAi agent comprising a first and a second strand, wherein the sequence of the first and/or second strand is the sequence of a first and/or second strand of: AD-38166.1 (SEQ ID NOs: 132 and 559), or modified or unmodified variants thereof, wherein the first and/or second strand further comprise up to about 20 additional nucleotides.

[2838] A RNAi agent comprising a first and a second strand, wherein the sequence of the first and/or second strand is the sequence of a first and/or second strand of: AD-38172.1 (SEQ ID NOs: 133 and 560), or modified or unmodified variants thereof, wherein the first and/or second strand further comprise up to about 20 additional nucleotides.

[2839] A RNAi agent comprising a first and a second strand, wherein the sequence of the first and/or second strand is the sequence of a first and/or second strand of: AD-38131.1 (SEQ ID NOs: 134 and 561), or modified or unmodified variants thereof, wherein the first and/or second strand further comprise up to about 20 additional nucleotides.

[2840] A RNAi agent comprising a first and a second strand, wherein the sequence of the first and/or second strand is the sequence of a first and/or second strand of: AD-38137.1 (SEQ ID NOs: 135 and 562), or modified or unmodified variants thereof, wherein the first and/or second strand further comprise up to about 20 additional nucleotides.

[2841] A RNAi agent comprising a first and a second strand, wherein the sequence of the first and/or second strand is the sequence of a first and/or second strand of: AD-38143.1 (SEQ ID NOs: 136 and 563), or modified or unmodified variants thereof, wherein the first and/or second strand further comprise up to about 20 additional nucleotides.

[2842] A RNAi agent comprising a first and a second strand, wherein the sequence of the first and/or second strand is the sequence of a first and/or second strand of: AD-38149.1 (SEQ ID NOs: 137 and 564), or modified or unmodified variants thereof, wherein the first and/or second strand further comprise up to about 20 additional nucleotides.

[2843] A RNAi agent comprising a first and a second strand, wherein the sequence of the first and/or second strand is the sequence of a first and/or second strand of: AD-38155.1 (SEQ ID NOs: 138 and 565), or modified or unmodified variants thereof, wherein the first and/or second strand further comprise up to about 20 additional nucleotides.

[2844] A RNAi agent comprising a first and a second strand, wherein the sequence of the first and/or second strand is the sequence of a first and/or second strand of: AD-38161.1 (SEQ ID NOs: 139 and 566), or modified or unmodified variants thereof, wherein the first and/or second strand further comprise up to about 20 additional nucleotides.

[2845] A RNAi agent comprising a first and a second strand, wherein the sequence of the first and/or second strand is the sequence of a first and/or second strand of: AD-38167.1 (SEQ ID NOs: 140 and 567), or modified or unmodified variants thereof, wherein the first and/or second strand further comprise up to about 20 additional nucleotides.

[2846] A RNAi agent comprising a first and a second strand, wherein the sequence of the first and/or second strand is the sequence of a first and/or second strand of: AD-38173.1 (SEQ ID NOs: 141 and 568), or modified or unmodified variants thereof, wherein the first and/or second strand

[2847] A RNAi agent comprising a first and a second strand, wherein the sequence of the first and/or second strand is the sequence of a first and/or second strand of: AD-38132.1 (SEQ ID NOs: 142 and 569), or modified or unmodified variants thereof, wherein the first and/or second strand further comprise up to about 20 additional nucleotides.

[2848] A RNAi agent comprising a first and a second strand, wherein the sequence of the first and/or second strand is the sequence of a first and/or second strand of: AD-38138.1 (SEQ ID NOs: 143 and 570), or modified or unmodified variants thereof, wherein the first and/or second strand further comprise up to about 20 additional nucleotides.

[2849] A RNAi agent comprising a first and a second strand, wherein the sequence of the first and/or second strand is the sequence of a first and/or second strand of: AD-38144.1 (SEQ ID NOs: 144 and 571), or modified or unmodified variants thereof, wherein the first and/or second strand further comprise up to about 20 additional nucleotides.

[2850] A RNAi agent comprising a first and a second strand, wherein the sequence of the first and/or second strand is the sequence of a first and/or second strand of: AD-38150.1 (SEQ ID NOs: 145 and 572), or modified or unmodified variants thereof, wherein the first and/or second strand further comprise up to about 20 additional nucleotides.

[2851] A RNAi agent comprising a first and a second strand, wherein the sequence of the first and/or second strand is the sequence of a first and/or second strand of: AD-38156.1 (SEQ ID NOs: 146 and 573), or modified or unmodified variants thereof, wherein the first and/or second strand further comprise up to about 20 additional nucleotides.

[2852] A RNAi agent comprising a first and a second strand, wherein the sequence of the first and/or second strand is the sequence of a first and/or second strand of: AD-38162.1 (SEQ ID NOs: 147 and 574), or modified or unmodified variants thereof, wherein the first and/or second strand further comprise up to about 20 additional nucleotides.

[2853] A RNAi agent comprising a first and a second strand, wherein the sequence of the first and/or second strand is the sequence of a first and/or second strand of: AD-38168.1 (SEQ ID NOs: 148 and 575), or modified or unmodified variants thereof, wherein the first and/or second strand further comprise up to about 20 additional nucleotides.

[2854] A RNAi agent comprising a first and a second strand, wherein the sequence of the first and/or second strand is the sequence of a first and/or second strand of: AD-38174.1 (SEQ ID NOs: 149 and 576), or modified or unmodified variants thereof, wherein the first and/or second strand further comprise up to about 20 additional nucleotides.

[2855] A RNAi agent comprising a first and a second strand, wherein the sequence of the first and/or second strand is the sequence of a first and/or second strand of: AD-39683.1 (SEQ ID NOs: 150 and 577), or modified or unmodified variants thereof, wherein the first and/or second strand further comprise up to about 20 additional nucleotides.

[2856] A RNAi agent comprising a first and a second strand, wherein the sequence of the first and/or second strand is the sequence of a first and/or second strand of: AD-39689.1 (SEQ ID NOs: 151 and 578), or modified or unmodified variants thereof, wherein the first and/or second strand

[2857] A RNAi agent comprising a first and a second strand, wherein the sequence of the first and/or second strand is the sequence of a first and/or second strand of: AD-39695.1 (SEQ ID NOs: 152 and 579), or modified or unmodified variants thereof, wherein the first and/or second strand further comprise up to about 20 additional nucleotides.

[2858] A RNAi agent comprising a first and a second strand, wherein the sequence of the first and/or second strand is the sequence of a first and/or second strand of: AD-39701.1 (SEQ ID NOs: 153 and 580), or modified or unmodified variants thereof, wherein the first and/or second strand further comprise up to about 20 additional nucleotides.

[2859] A RNAi agent comprising a first and a second strand, wherein the sequence of the first and/or second strand is the sequence of a first and/or second strand of: AD-39707.1 (SEQ ID NOs: 154 and 581), or modified or unmodified variants thereof, wherein the first and/or second strand further comprise up to about 20 additional nucleotides.

[2860] A RNAi agent comprising a first and a second strand, wherein the sequence of the first and/or second strand is the sequence of a first and/or second strand of: AD-39713.1 (SEQ ID NOs: 155 and 582), or modified or unmodified variants thereof, wherein the first and/or second strand further comprise up to about 20 additional nucleotides.

[2861] A RNAi agent comprising a first and a second strand, wherein the sequence of the first and/or second strand is the sequence of a first and/or second strand of: AD-39719.1 (SEQ ID NOs: 156 and 583), or modified or unmodified variants thereof, wherein the first and/or second strand further comprise up to about 20 additional nucleotides.

[2862] A RNAi agent comprising a first and a second strand, wherein the sequence of the first and/or second strand is the sequence of a first and/or second strand of: AD-39725.1 (SEQ ID NOs: 157 and 584), or modified or unmodified variants thereof, wherein the first and/or second strand further comprise up to about 20 additional nucleotides.

[2863] A RNAi agent comprising a first and a second strand, wherein the sequence of the first and/or second strand is the sequence of a first and/or second strand of: AD-39684.1 (SEQ ID NOs: 158 and 585), or modified or unmodified variants thereof, wherein the first and/or second strand further comprise up to about 20 additional nucleotides.

[2864] A RNAi agent comprising a first and a second strand, wherein the sequence of the first and/or second strand is the sequence of a first and/or second strand of: AD-39690.1 (SEQ ID NOs: 159 and 586), or modified or unmodified variants thereof, wherein the first and/or second strand further comprise up to about 20 additional nucleotides.

[2865] A RNAi agent comprising a first and a second strand, wherein the sequence of the first and/or second strand is the sequence of a first and/or second strand of: AD-39696.1 (SEQ ID NOs: 160 and 587), or modified or unmodified variants thereof, wherein the first and/or second strand further comprise up to about 20 additional nucleotides.

[2866] A RNAi agent comprising a first and a second strand, wherein the sequence of the first and/or second strand is the sequence of a first and/or second strand of: AD-39702.1 (SEQ ID NOs: 161 and 588), or modified or unmodified variants thereof, wherein the first and/or second strand further comprise up to about 20 additional nucleotides.

[2867] A RNAi agent comprising a first and a second strand, wherein the sequence of the first and/or second strand is the sequence of a first and/or second strand of: AD-39708.1 (SEQ ID NOs: 162 and 589), or modified or unmodified variants thereof, wherein the first and/or second strand further comprise up to about 20 additional nucleotides.

[2868] A RNAi agent comprising a first and a second strand, wherein the sequence of the first and/or second strand is the sequence of a first and/or second strand of: AD-39714.1 (SEQ ID NOs: 163 and 590), or modified or unmodified variants thereof, wherein the first and/or second strand further comprise up to about 20 additional nucleotides.

[2869] A RNAi agent comprising a first and a second strand, wherein the sequence of the first and/or second strand is the sequence of a first and/or second strand of: AD-39720.1 (SEQ ID NOs: 164 and 591), or modified or unmodified variants thereof, wherein the first and/or second strand further comprise up to about 20 additional nucleotides.

[2870] A RNAi agent comprising a first and a second strand, wherein the sequence of the first and/or second strand is the sequence of a first and/or second strand of: AD-39726.1 (SEQ ID NOs: 165 and 592), or modified or unmodified variants thereof, wherein the first and/or second strand further comprise up to about 20 additional nucleotides.

[2871] A RNAi agent comprising a first and a second strand, wherein the sequence of the first and/or second strand is the sequence of a first and/or second strand of: AD-39685.1 (SEQ ID NOs: 166 and 593), or modified or unmodified variants thereof, wherein the first and/or second strand further comprise up to about 20 additional nucleotides.

[2872] A RNAi agent comprising a first and a second strand, wherein the sequence of the first and/or second strand is the sequence of a first and/or second strand of: AD-39691.1 (SEQ ID NOs: 167 and 594), or modified or unmodified variants thereof, wherein the first and/or second strand further comprise up to about 20 additional nucleotides.

[2873] A RNAi agent comprising a first and a second strand, wherein the sequence of the first and/or second strand is the sequence of a first and/or second strand of: AD-39697.1 (SEQ ID NOs: 168 and 595), or modified or unmodified variants thereof, wherein the first and/or second strand further comprise up to about 20 additional nucleotides.

[2874] A RNAi agent comprising a first and a second strand, wherein the sequence of the first and/or second strand is the sequence of a first and/or second strand of: AD-39703.1 (SEQ ID NOs: 169 and 596), or modified or unmodified variants thereof, wherein the first and/or second strand further comprise up to about 20 additional nucleotides.

[2875] A RNAi agent comprising a first and a second strand, wherein the sequence of the first and/or second strand is the sequence of a first and/or second strand of: AD-39709.1 (SEQ ID NOs: 170 and 597), or modified or unmodified variants thereof, wherein the first and/or second strand further comprise up to about 20 additional nucleotides.

[2876] A RNAi agent comprising a first and a second strand, wherein the sequence of the first and/or second strand is the sequence of a first and/or second strand of: AD-39715.1 (SEQ ID NOs: 171 and 598), or modified or unmodified variants thereof, wherein the first and/or second strand further comprise up to about 20 additional nucleotides.

[2877] A RNAi agent comprising a first and a second strand, wherein the sequence of the first and/or second strand is the sequence of a first and/or second strand of: AD-39721.1 (SEQ ID NOs: 172 and 599), or modified or unmodified variants thereof, wherein the first and/or second strand further comprise up to about 20 additional nucleotides.

[2878] A RNAi agent comprising a first and a second strand, wherein the sequence of the first and/or second strand is the sequence of a first and/or second strand of: AD-39727.1 (SEQ ID NOs: 173 and 600), or modified or unmodified variants thereof, wherein the first and/or second strand further comprise up to about 20 additional nucleotides.

[2879] A RNAi agent comprising a first and a second strand, wherein the sequence of the first and/or second strand is the sequence of a first and/or second strand of: AD-39686.1 (SEQ ID NOs: 174 and 601), or modified or unmodified variants thereof, wherein the first and/or second strand further comprise up to about 20 additional nucleotides.

[2880] A RNAi agent comprising a first and a second strand, wherein the sequence of the first and/or second strand is the sequence of a first and/or second strand of: AD-39692.1 (SEQ ID NOs: 175 and 602), or modified or unmodified variants thereof, wherein the first and/or second strand further comprise up to about 20 additional nucleotides.

[2881] A RNAi agent comprising a first and a second strand, wherein the sequence of the first and/or second strand is the sequence of a first and/or second strand of: AD-39698.1 (SEQ ID NOs: 176 and 603), or modified or unmodified variants thereof, wherein the first and/or second strand further comprise up to about 20 additional nucleotides.

[2882] A RNAi agent comprising a first and a second strand, wherein the sequence of the first and/or second strand is the sequence of a first and/or second strand of: AD-39704.1 (SEQ ID NOs: 177 and 604), or modified or unmodified variants thereof, wherein the first and/or second strand further comprise up to about 20 additional nucleotides.

[2883] A RNAi agent comprising a first and a second strand, wherein the sequence of the first and/or second strand is the sequence of a first and/or second strand of: AD-39710.1 (SEQ ID NOs: 178 and 605), or modified or unmodified variants thereof, wherein the first and/or second strand further comprise up to about 20 additional nucleotides.

[2884] A RNAi agent comprising a first and a second strand, wherein the sequence of the first and/or second strand is the sequence of a first and/or second strand of: AD-39716.1 (SEQ ID NOs: 179 and 606), or modified or unmodified variants thereof, wherein the first and/or second strand further comprise up to about 20 additional nucleotides.

[2885] A RNAi agent comprising a first and a second strand, wherein the sequence of the first and/or second strand is the sequence of a first and/or second strand of: AD-39722.1 (SEQ ID NOs: 180 and 607), or modified or unmodified variants thereof, wherein the first and/or second strand further comprise up to about 20 additional nucleotides.

[2886] A RNAi agent comprising a first and a second strand, wherein the sequence of the first and/or second strand is the sequence of a first and/or second strand of: AD-39728.1 (SEQ ID NOs: 181 and 608), or modified or unmodified variants thereof, wherein the first and/or second strand further comprise up to about 20 additional nucleotides.

[2887] A RNAi agent comprising a first and a second strand, wherein the sequence of the first and/or second strand is the sequence of a first and/or second strand of: AD-39687.1 (SEQ ID NOs: 182 and 609), or modified or unmodified variants thereof, wherein the first and/or second strand

[2888] A RNAi agent comprising a first and a second strand, wherein the sequence of the first and/or second strand is the sequence of a first and/or second strand of: AD-39693.1 (SEQ ID NOs: 183 and 610), or modified or unmodified variants thereof, wherein the first and/or second strand further comprise up to about 20 additional nucleotides.

[2889] A RNAi agent comprising a first and a second strand, wherein the sequence of the first and/or second strand is the sequence of a first and/or second strand of: AD-39699.1 (SEQ ID NOs: 184 and 611), or modified or unmodified variants thereof, wherein the first and/or second strand further comprise up to about 20 additional nucleotides.

[2890] A RNAi agent comprising a first and a second strand, wherein the sequence of the first and/or second strand is the sequence of a first and/or second strand of: AD-39705.1 (SEQ ID NOs: 185 and 612), or modified or unmodified variants thereof, wherein the first and/or second strand further comprise up to about 20 additional nucleotides.

[2891] A RNAi agent comprising a first and a second strand, wherein the sequence of the first and/or second strand is the sequence of a first and/or second strand of: AD-39711.1 (SEQ ID NOs: 186 and 613), or modified or unmodified variants thereof, wherein the first and/or second strand further comprise up to about 20 additional nucleotides.

[2892] A RNAi agent comprising a first and a second strand, wherein the sequence of the first and/or second strand is the sequence of a first and/or second strand of: AD-39717.1 (SEQ ID NOs: 187 and 614), or modified or unmodified variants thereof, wherein the first and/or second strand further comprise up to about 20 additional nucleotides.

[2893] A RNAi agent comprising a first and a second strand, wherein the sequence of the first and/or second strand is the sequence of a first and/or second strand of: AD-39723.1 (SEQ ID NOs: 188 and 615), or modified or unmodified variants thereof, wherein the first and/or second strand further comprise up to about 20 additional nucleotides.

[2894] A RNAi agent comprising a first and a second strand, wherein the sequence of the first and/or second strand is the sequence of a first and/or second strand of: AD-39729.1 (SEQ ID NOs: 189 and 616), or modified or unmodified variants thereof, wherein the first and/or second strand further comprise up to about 20 additional nucleotides.

[2895] A RNAi agent comprising a first and a second strand, wherein the sequence of the first and/or second strand is the sequence of a first and/or second strand of: AD-39688.1 (SEQ ID NOs: 190 and 617), or modified or unmodified variants thereof, wherein the first and/or second strand further comprise up to about 20 additional nucleotides.

[2896] A RNAi agent comprising a first and a second strand, wherein the sequence of the first and/or second strand is the sequence of a first and/or second strand of: AD-39694.1 (SEQ ID NOs: 191 and 618), or modified or unmodified variants thereof, wherein the first and/or second strand further comprise up to about 20 additional nucleotides.

[2897] A RNAi agent comprising a first and a second strand, wherein the sequence of the first and/or second strand is the sequence of a first and/or second strand of: AD-39700.1 (SEQ ID NOs: 192 and 619), or modified or unmodified variants thereof, wherein the first and/or second strand

[2898] A RNAi agent comprising a first and a second strand, wherein the sequence of the first and/or second strand is the sequence of a first and/or second strand of: AD-39706.1 (SEQ ID NOs: 193 and 620), or modified or unmodified variants thereof, wherein the first and/or second strand further comprise up to about 20 additional nucleotides.

[2899] A RNAi agent comprising a first and a second strand, wherein the sequence of the first and/or second strand is the sequence of a first and/or second strand of: AD-39712.1 (SEQ ID NOs: 194 and 621), or modified or unmodified variants thereof, wherein the first and/or second strand further comprise up to about 20 additional nucleotides.

[2900] A RNAi agent comprising a first and a second strand, wherein the sequence of the first and/or second strand is the sequence of a first and/or second strand of: AD-39718.1 (SEQ ID NOs: 195 and 622), or modified or unmodified variants thereof, wherein the first and/or second strand further comprise up to about 20 additional nucleotides.

[2901] A RNAi agent comprising a first and a second strand, wherein the sequence of the first and/or second strand is the sequence of a first and/or second strand of: AD-39724.1 (SEQ ID NOs: 196 and 623), or modified or unmodified variants thereof, wherein the first and/or second strand further comprise up to about 20 additional nucleotides.

[2902] A RNAi agent comprising a first and a second strand, wherein the sequence of the first and/or second strand is the sequence of a first and/or second strand of: AD-39730.1 (SEQ ID NOs: 197 and 624), or modified or unmodified variants thereof, wherein the first and/or second strand further comprise up to about 20 additional nucleotides.

[2903] A RNAi agent comprising a first and a second strand, wherein the sequence of the first and/or second strand is the sequence of a first and/or second strand of: AD-39736.1 (SEQ ID NOs: 198 and 625), or modified or unmodified variants thereof, wherein the first and/or second strand further comprise up to about 20 additional nucleotides.

[2904] A RNAi agent comprising a first and a second strand, wherein the sequence of the first and/or second strand is the sequence of a first and/or second strand of: AD-39742.1 (SEQ ID NOs: 199 and 626), or modified or unmodified variants thereof, wherein the first and/or second strand further comprise up to about 20 additional nucleotides.

[2905] A RNAi agent comprising a first and a second strand, wherein the sequence of the first and/or second strand is the sequence of a first and/or second strand of: AD-39748.1 (SEQ ID NOs: 200 and 627), or modified or unmodified variants thereof, wherein the first and/or second strand further comprise up to about 20 additional nucleotides.

[2906] A RNAi agent comprising a first and a second strand, wherein the sequence of the first and/or second strand is the sequence of a first and/or second strand of: AD-39754.1 (SEQ ID NOs: 201 and 628), or modified or unmodified variants thereof, wherein the first and/or second strand further comprise up to about 20 additional nucleotides.

[2907] A RNAi agent comprising a first and a second strand, wherein the sequence of the first and/or second strand is the sequence of a first and/or second strand of: AD-39760.1 (SEQ ID NOs: 202 and 629), or modified or unmodified variants thereof, wherein the first and/or second strand further comprise up to about 20 additional nucleotides.

[2908] A RNAi agent comprising a first and a second strand, wherein the sequence of the first and/or second strand is the sequence of a first and/or second strand of: AD-39766.1 (SEQ ID NOs: 203 and 630), or modified or unmodified variants thereof, wherein the first and/or second strand further comprise up to about 20 additional nucleotides.

[2909] A RNAi agent comprising a first and a second strand, wherein the sequence of the first and/or second strand is the sequence of a first and/or second strand of: AD-39772.1 (SEQ ID NOs: 204 and 631), or modified or unmodified variants thereof, wherein the first and/or second strand further comprise up to about 20 additional nucleotides.

[2910] A RNAi agent comprising a first and a second strand, wherein the sequence of the first and/or second strand is the sequence of a first and/or second strand of: AD-39731.1 (SEQ ID NOs: 205 and 632), or modified or unmodified variants thereof, wherein the first and/or second strand further comprise up to about 20 additional nucleotides.

[2911] A RNAi agent comprising a first and a second strand, wherein the sequence of the first and/or second strand is the sequence of a first and/or second strand of: AD-39737.1 (SEQ ID NOs: 206 and 633), or modified or unmodified variants thereof, wherein the first and/or second strand further comprise up to about 20 additional nucleotides.

[2912] A RNAi agent comprising a first and a second strand, wherein the sequence of the first and/or second strand is the sequence of a first and/or second strand of: AD-39743.1 (SEQ ID NOs: 207 and 634), or modified or unmodified variants thereof, wherein the first and/or second strand further comprise up to about 20 additional nucleotides.

[2913] A RNAi agent comprising a first and a second strand, wherein the sequence of the first and/or second strand is the sequence of a first and/or second strand of: AD-39749.1 (SEQ ID NOs: 208 and 635), or modified or unmodified variants thereof, wherein the first and/or second strand further comprise up to about 20 additional nucleotides.

[2914] A RNAi agent comprising a first and a second strand, wherein the sequence of the first and/or second strand is the sequence of a first and/or second strand of: AD-39755.1 (SEQ ID NOs: 209 and 636), or modified or unmodified variants thereof, wherein the first and/or second strand further comprise up to about 20 additional nucleotides.

[2915] A RNAi agent comprising a first and a second strand, wherein the sequence of the first and/or second strand is the sequence of a first and/or second strand of: AD-39761.1 (SEQ ID NOs: 210 and 637), or modified or unmodified variants thereof, wherein the first and/or second strand further comprise up to about 20 additional nucleotides.

[2916] A RNAi agent comprising a first and a second strand, wherein the sequence of the first and/or second strand is the sequence of a first and/or second strand of: AD-39767.1 (SEQ ID NOs: 211 and 638), or modified or unmodified variants thereof, wherein the first and/or second strand further comprise up to about 20 additional nucleotides.

[2917] A RNAi agent comprising a first and a second strand, wherein the sequence of the first and/or second strand is the sequence of a first and/or second strand of: AD-39773.1 (SEQ ID NOs: 212 and 639), or modified or unmodified variants thereof, wherein the first and/or second strand further comprise up to about 20 additional nucleotides.

[2918] A RNAi agent comprising a first and a second strand, wherein the sequence of the first and/or second strand is the sequence of a first and/or second strand of: AD-39732.1 (SEQ ID NOs: 213 and 640), or modified or unmodified variants thereof, wherein the first and/or second strand further comprise up to about 20 additional nucleotides.

[2919] A RNAi agent comprising a first and a second strand, wherein the sequence of the first and/or second strand is the sequence of a first and/or second strand of: AD-39738.1 (SEQ ID NOs: 214 and 641), or modified or unmodified variants thereof, wherein the first and/or second strand further comprise up to about 20 additional nucleotides.

[2920] A RNAi agent comprising a first and a second strand, wherein the sequence of the first and/or second strand is the sequence of a first and/or second strand of: AD-39744.1 (SEQ ID NOs: 215 and 642), or modified or unmodified variants thereof, wherein the first and/or second strand further comprise up to about 20 additional nucleotides.

[2921] A RNAi agent comprising a first and a second strand, wherein the sequence of the first and/or second strand is the sequence of a first and/or second strand of: AD-39750.1 (SEQ ID NOs: 216 and 643), or modified or unmodified variants thereof, wherein the first and/or second strand further comprise up to about 20 additional nucleotides.

[2922] A RNAi agent comprising a first and a second strand, wherein the sequence of the first and/or second strand is the sequence of a first and/or second strand of: AD-39756.1 (SEQ ID NOs: 217 and 644), or modified or unmodified variants thereof, wherein the first and/or second strand further comprise up to about 20 additional nucleotides.

[2923] A RNAi agent comprising a first and a second strand, wherein the sequence of the first and/or second strand is the sequence of a first and/or second strand of: AD-39762.1 (SEQ ID NOs: 218 and 645), or modified or unmodified variants thereof, wherein the first and/or second strand further comprise up to about 20 additional nucleotides.

[2924] A RNAi agent comprising a first and a second strand, wherein the sequence of the first and/or second strand is the sequence of a first and/or second strand of: AD-39768.1 (SEQ ID NOs: 219 and 646), or modified or unmodified variants thereof, wherein the first and/or second strand further comprise up to about 20 additional nucleotides.

[2925] A RNAi agent comprising a first and a second strand, wherein the sequence of the first and/or second strand is the sequence of a first and/or second strand of: AD-39774.1 (SEQ ID NOs: 220 and 647), or modified or unmodified variants thereof, wherein the first and/or second strand further comprise up to about 20 additional nucleotides.

[2926] A RNAi agent comprising a first and a second strand, wherein the sequence of the first and/or second strand is the sequence of a first and/or second strand of: AD-39733.1 (SEQ ID NOs: 221 and 648), or modified or unmodified variants thereof, wherein the first and/or second strand further comprise up to about 20 additional nucleotides.

[2927] A RNAi agent comprising a first and a second strand, wherein the sequence of the first and/or second strand is the sequence of a first and/or second strand of: AD-39739.1 (SEQ ID NOs: 222 and 649), or modified or unmodified variants thereof, wherein the first and/or second strand further comprise up to about 20 additional nucleotides.

[2928] A RNAi agent comprising a first and a second strand, wherein the sequence of the first and/or second strand is the sequence of a first and/or second strand of: AD-39745.1 (SEQ ID NOs: 223 and 650), or modified or unmodified variants thereof, wherein the first and/or second strand

[2929] A RNAi agent comprising a first and a second strand, wherein the sequence of the first and/or second strand is the sequence of a first and/or second strand of: AD-39751.1 (SEQ ID NOs: 224 and 651), or modified or unmodified variants thereof, wherein the first and/or second strand further comprise up to about 20 additional nucleotides.

[2930] A RNAi agent comprising a first and a second strand, wherein the sequence of the first and/or second strand is the sequence of a first and/or second strand of: AD-39757.1 (SEQ ID NOs: 225 and 652), or modified or unmodified variants thereof, wherein the first and/or second strand further comprise up to about 20 additional nucleotides.

[2931] A RNAi agent comprising a first and a second strand, wherein the sequence of the first and/or second strand is the sequence of a first and/or second strand of: AD-39763.1 (SEQ ID NOs: 226 and 653), or modified or unmodified variants thereof, wherein the first and/or second strand further comprise up to about 20 additional nucleotides.

[2932] A RNAi agent comprising a first and a second strand, wherein the sequence of the first and/or second strand is the sequence of a first and/or second strand of: AD-39769.1 (SEQ ID NOs: 227 and 654), or modified or unmodified variants thereof, wherein the first and/or second strand further comprise up to about 20 additional nucleotides.

[2933] A RNAi agent comprising a first and a second strand, wherein the sequence of the first and/or second strand is the sequence of a first and/or second strand of: AD-39775.1 (SEQ ID NOs: 228 and 655), or modified or unmodified variants thereof, wherein the first and/or second strand further comprise up to about 20 additional nucleotides.

[2934] A RNAi agent comprising a first and a second strand, wherein the sequence of the first and/or second strand is the sequence of a first and/or second strand of: AD-39734.1 (SEQ ID NOs: 229 and 656), or modified or unmodified variants thereof, wherein the first and/or second strand further comprise up to about 20 additional nucleotides.

[2935] A RNAi agent comprising a first and a second strand, wherein the sequence of the first and/or second strand is the sequence of a first and/or second strand of: AD-39740.1 (SEQ ID NOs: 230 and 657), or modified or unmodified variants thereof, wherein the first and/or second strand further comprise up to about 20 additional nucleotides.

[2936] A RNAi agent comprising a first and a second strand, wherein the sequence of the first and/or second strand is the sequence of a first and/or second strand of: AD-39746.1 (SEQ ID NOs: 231 and 658), or modified or unmodified variants thereof, wherein the first and/or second strand further comprise up to about 20 additional nucleotides.

[2937] A RNAi agent comprising a first and a second strand, wherein the sequence of the first and/or second strand is the sequence of a first and/or second strand of: AD-39752.1 (SEQ ID NOs: 232 and 659), or modified or unmodified variants thereof, wherein the first and/or second strand further comprise up to about 20 additional nucleotides.

[2938] A RNAi agent comprising a first and a second strand, wherein the sequence of the first and/or second strand is the sequence of a first and/or second strand of: AD-39758.1 (SEQ ID NOs: 233 and 660), or modified or unmodified variants thereof, wherein the first and/or second strand

[2939] A RNAi agent comprising a first and a second strand, wherein the sequence of the first and/or second strand is the sequence of a first and/or second strand of: AD-39764.1 (SEQ ID NOs: 234 and 661), or modified or unmodified variants thereof, wherein the first and/or second strand further comprise up to about 20 additional nucleotides.

[2940] A RNAi agent comprising a first and a second strand, wherein the sequence of the first and/or second strand is the sequence of a first and/or second strand of: AD-39770.1 (SEQ ID NOs: 235 and 662), or modified or unmodified variants thereof, wherein the first and/or second strand further comprise up to about 20 additional nucleotides.

[2941] A RNAi agent comprising a first and a second strand, wherein the sequence of the first and/or second strand is the sequence of a first and/or second strand of: AD-39776.1 (SEQ ID NOs: 236 and 663), or modified or unmodified variants thereof, wherein the first and/or second strand further comprise up to about 20 additional nucleotides.

[2942] A RNAi agent comprising a first and a second strand, wherein the sequence of the first and/or second strand is the sequence of a first and/or second strand of: AD-39735.1 (SEQ ID NOs: 237 and 664), or modified or unmodified variants thereof, wherein the first and/or second strand further comprise up to about 20 additional nucleotides.

[2943] A RNAi agent comprising a first and a second strand, wherein the sequence of the first and/or second strand is the sequence of a first and/or second strand of: AD-39741.1 (SEQ ID NOs: 238 and 665), or modified or unmodified variants thereof, wherein the first and/or second strand further comprise up to about 20 additional nucleotides.

[2944] A RNAi agent comprising a first and a second strand, wherein the sequence of the first and/or second strand is the sequence of a first and/or second strand of: AD-39747.1 (SEQ ID NOs: 239 and 666), or modified or unmodified variants thereof, wherein the first and/or second strand further comprise up to about 20 additional nucleotides.

[2945] A RNAi agent comprising a first and a second strand, wherein the sequence of the first and/or second strand is the sequence of a first and/or second strand of: AD-39753.1 (SEQ ID NOs: 240 and 667), or modified or unmodified variants thereof, wherein the first and/or second strand further comprise up to about 20 additional nucleotides.

[2946] A RNAi agent comprising a first and a second strand, wherein the sequence of the first and/or second strand is the sequence of a first and/or second strand of: AD-39759.1 (SEQ ID NOs: 241 and 668), or modified or unmodified variants thereof, wherein the first and/or second strand further comprise up to about 20 additional nucleotides.

[2947] A RNAi agent comprising a first and a second strand, wherein the sequence of the first and/or second strand is the sequence of a first and/or second strand of: AD-39765.1 (SEQ ID NOs: 242 and 669), or modified or unmodified variants thereof, wherein the first and/or second strand further comprise up to about 20 additional nucleotides.

[2948] A RNAi agent comprising a first and a second strand, wherein the sequence of the first and/or second strand is the sequence of a first and/or second strand of: AD-39771.1 (SEQ ID NOs: 243 and 670), or modified or unmodified variants thereof, wherein the first and/or second strand further comprise up to about 20 additional nucleotides.

[2949] A RNAi agent comprising a first and a second strand, wherein the sequence of the first and/or second strand is the sequence of a first and/or second strand of: AD-39778.1 (SEQ ID NOs: 244 and 671), or modified or unmodified variants thereof, wherein the first and/or second strand further comprise up to about 20 additional nucleotides.

[2950] A RNAi agent comprising a first and a second strand, wherein the sequence of the first and/or second strand is the sequence of a first and/or second strand of: AD-39784.1 (SEQ ID NOs: 245 and 672), or modified or unmodified variants thereof, wherein the first and/or second strand further comprise up to about 20 additional nucleotides.

[2951] A RNAi agent comprising a first and a second strand, wherein the sequence of the first and/or second strand is the sequence of a first and/or second strand of: AD-39790.1 (SEQ ID NOs: 246 and 673), or modified or unmodified variants thereof, wherein the first and/or second strand further comprise up to about 20 additional nucleotides.

[2952] A RNAi agent comprising a first and a second strand, wherein the sequence of the first and/or second strand is the sequence of a first and/or second strand of: AD-39796.1 (SEQ ID NOs: 247 and 674), or modified or unmodified variants thereof, wherein the first and/or second strand further comprise up to about 20 additional nucleotides.

[2953] A RNAi agent comprising a first and a second strand, wherein the sequence of the first and/or second strand is the sequence of a first and/or second strand of: AD-39802.1 (SEQ ID NOs: 248 and 675), or modified or unmodified variants thereof, wherein the first and/or second strand further comprise up to about 20 additional nucleotides.

[2954] A RNAi agent comprising a first and a second strand, wherein the sequence of the first and/or second strand is the sequence of a first and/or second strand of: AD-39808.1 (SEQ ID NOs: 249 and 676), or modified or unmodified variants thereof, wherein the first and/or second strand further comprise up to about 20 additional nucleotides.

[2955] A RNAi agent comprising a first and a second strand, wherein the sequence of the first and/or second strand is the sequence of a first and/or second strand of: AD-39814.1 (SEQ ID NOs: 250 and 677), or modified or unmodified variants thereof, wherein the first and/or second strand further comprise up to about 20 additional nucleotides.

[2956] A RNAi agent comprising a first and a second strand, wherein the sequence of the first and/or second strand is the sequence of a first and/or second strand of: AD-39820.1 (SEQ ID NOs: 251 and 678), or modified or unmodified variants thereof, wherein the first and/or second strand further comprise up to about 20 additional nucleotides.

[2957] A RNAi agent comprising a first and a second strand, wherein the sequence of the first and/or second strand is the sequence of a first and/or second strand of: AD-39779.1 (SEQ ID NOs: 252 and 679), or modified or unmodified variants thereof, wherein the first and/or second strand further comprise up to about 20 additional nucleotides.

[2958] A RNAi agent comprising a first and a second strand, wherein the sequence of the first and/or second strand is the sequence of a first and/or second strand of: AD-39785.1 (SEQ ID NOs: 253 and 680), or modified or unmodified variants thereof, wherein the first and/or second strand further comprise up to about 20 additional nucleotides.

[2959] A RNAi agent comprising a first and a second strand, wherein the sequence of the first and/or second strand is the sequence of a first and/or second strand of: AD-39791.1 (SEQ ID NOs: 254 and 681), or modified or unmodified variants thereof, wherein the first and/or second strand further comprise up to about 20 additional nucleotides.

[2960] A RNAi agent comprising a first and a second strand, wherein the sequence of the first and/or second strand is the sequence of a first and/or second strand of: AD-39797.1 (SEQ ID NOs: 255 and 682), or modified or unmodified variants thereof, wherein the first and/or second strand further comprise up to about 20 additional nucleotides.

[2961] A RNAi agent comprising a first and a second strand, wherein the sequence of the first and/or second strand is the sequence of a first and/or second strand of: AD-39803.1 (SEQ ID NOs: 256 and 683), or modified or unmodified variants thereof, wherein the first and/or second strand further comprise up to about 20 additional nucleotides.

[2962] A RNAi agent comprising a first and a second strand, wherein the sequence of the first and/or second strand is the sequence of a first and/or second strand of: AD-39809.1 (SEQ ID NOs: 257 and 684), or modified or unmodified variants thereof, wherein the first and/or second strand further comprise up to about 20 additional nucleotides.

[2963] A RNAi agent comprising a first and a second strand, wherein the sequence of the first and/or second strand is the sequence of a first and/or second strand of: AD-39815.1 (SEQ ID NOs: 258 and 685), or modified or unmodified variants thereof, wherein the first and/or second strand further comprise up to about 20 additional nucleotides.

[2964] A RNAi agent comprising a first and a second strand, wherein the sequence of the first and/or second strand is the sequence of a first and/or second strand of: AD-39821.1 (SEQ ID NOs: 259 and 686), or modified or unmodified variants thereof, wherein the first and/or second strand further comprise up to about 20 additional nucleotides.

[2965] A RNAi agent comprising a first and a second strand, wherein the sequence of the first and/or second strand is the sequence of a first and/or second strand of: AD-39780.1 (SEQ ID NOs: 260 and 687), or modified or unmodified variants thereof, wherein the first and/or second strand further comprise up to about 20 additional nucleotides.

[2966] A RNAi agent comprising a first and a second strand, wherein the sequence of the first and/or second strand is the sequence of a first and/or second strand of: AD-39786.1 (SEQ ID NOs: 261 and 688), or modified or unmodified variants thereof, wherein the first and/or second strand further comprise up to about 20 additional nucleotides.

[2967] A RNAi agent comprising a first and a second strand, wherein the sequence of the first and/or second strand is the sequence of a first and/or second strand of: AD-39792.1 (SEQ ID NOs: 262 and 689), or modified or unmodified variants thereof, wherein the first and/or second strand further comprise up to about 20 additional nucleotides.

[2968] A RNAi agent comprising a first and a second strand, wherein the sequence of the first and/or second strand is the sequence of a first and/or second strand of: AD-39798.1 (SEQ ID NOs: 263 and 690), or modified or unmodified variants thereof, wherein the first and/or second strand further comprise up to about 20 additional nucleotides.

[2969] A RNAi agent comprising a first and a second strand, wherein the sequence of the first and/or second strand is the sequence of a first and/or second strand of: AD-39804.1 (SEQ ID NOs: 264 and 691), or modified or unmodified variants thereof, wherein the first and/or second strand

[2970] A RNAi agent comprising a first and a second strand, wherein the sequence of the first and/or second strand is the sequence of a first and/or second strand of: AD-39810.1 (SEQ ID NOs: 265 and 692), or modified or unmodified variants thereof, wherein the first and/or second strand further comprise up to about 20 additional nucleotides.

[2971] A RNAi agent comprising a first and a second strand, wherein the sequence of the first and/or second strand is the sequence of a first and/or second strand of: AD-39816.1 (SEQ ID NOs: 266 and 693), or modified or unmodified variants thereof, wherein the first and/or second strand further comprise up to about 20 additional nucleotides.

[2972] A RNAi agent comprising a first and a second strand, wherein the sequence of the first and/or second strand is the sequence of a first and/or second strand of: AD-39822.1 (SEQ ID NOs: 267 and 694), or modified or unmodified variants thereof, wherein the first and/or second strand further comprise up to about 20 additional nucleotides.

[2973] A RNAi agent comprising a first and a second strand, wherein the sequence of the first and/or second strand is the sequence of a first and/or second strand of: AD-39781.1 (SEQ ID NOs: 268 and 695), or modified or unmodified variants thereof, wherein the first and/or second strand further comprise up to about 20 additional nucleotides.

[2974] A RNAi agent comprising a first and a second strand, wherein the sequence of the first and/or second strand is the sequence of a first and/or second strand of: AD-39787.1 (SEQ ID NOs: 269 and 696), or modified or unmodified variants thereof, wherein the first and/or second strand further comprise up to about 20 additional nucleotides.

[2975] A RNAi agent comprising a first and a second strand, wherein the sequence of the first and/or second strand is the sequence of a first and/or second strand of: AD-39793.1 (SEQ ID NOs: 270 and 697), or modified or unmodified variants thereof, wherein the first and/or second strand further comprise up to about 20 additional nucleotides.

[2976] A RNAi agent comprising a first and a second strand, wherein the sequence of the first and/or second strand is the sequence of a first and/or second strand of: AD-39799.1 (SEQ ID NOs: 271 and 698), or modified or unmodified variants thereof, wherein the first and/or second strand further comprise up to about 20 additional nucleotides.

[2977] A RNAi agent comprising a first and a second strand, wherein the sequence of the first and/or second strand is the sequence of a first and/or second strand of: AD-39805.1 (SEQ ID NOs: 272 and 699), or modified or unmodified variants thereof, wherein the first and/or second strand further comprise up to about 20 additional nucleotides.

[2978] A RNAi agent comprising a first and a second strand, wherein the sequence of the first and/or second strand is the sequence of a first and/or second strand of: AD-39811.1 (SEQ ID NOs: 273 and 700), or modified or unmodified variants thereof, wherein the first and/or second strand further comprise up to about 20 additional nucleotides.

[2979] A RNAi agent comprising a first and a second strand, wherein the sequence of the first and/or second strand is the sequence of a first and/or second strand of: AD-39817.1 (SEQ ID NOs: 274 and 701), or modified or unmodified variants thereof, wherein the first and/or second strand

[2980] A RNAi agent comprising a first and a second strand, wherein the sequence of the first and/or second strand is the sequence of a first and/or second strand of: AD-39823.1 (SEQ ID NOs: 275 and 702), or modified or unmodified variants thereof, wherein the first and/or second strand further comprise up to about 20 additional nucleotides.

[2981] A RNAi agent comprising a first and a second strand, wherein the sequence of the first and/or second strand is the sequence of a first and/or second strand of: AD-39782.1 (SEQ ID NOs: 276 and 703), or modified or unmodified variants thereof, wherein the first and/or second strand further comprise up to about 20 additional nucleotides.

[2982] A RNAi agent comprising a first and a second strand, wherein the sequence of the first and/or second strand is the sequence of a first and/or second strand of: AD-39788.1 (SEQ ID NOs: 277 and 704), or modified or unmodified variants thereof, wherein the first and/or second strand further comprise up to about 20 additional nucleotides.

[2983] A RNAi agent comprising a first and a second strand, wherein the sequence of the first and/or second strand is the sequence of a first and/or second strand of: AD-39794.1 (SEQ ID NOs: 278 and 705), or modified or unmodified variants thereof, wherein the first and/or second strand further comprise up to about 20 additional nucleotides.

[2984] A RNAi agent comprising a first and a second strand, wherein the sequence of the first and/or second strand is the sequence of a first and/or second strand of: AD-39800.1 (SEQ ID NOs: 279 and 706), or modified or unmodified variants thereof, wherein the first and/or second strand further comprise up to about 20 additional nucleotides.

[2985] A RNAi agent comprising a first and a second strand, wherein the sequence of the first and/or second strand is the sequence of a first and/or second strand of: AD-39806.1 (SEQ ID NOs: 280 and 707), or modified or unmodified variants thereof, wherein the first and/or second strand further comprise up to about 20 additional nucleotides.

[2986] A RNAi agent comprising a first and a second strand, wherein the sequence of the first and/or second strand is the sequence of a first and/or second strand of: AD-39812.1 (SEQ ID NOs: 281 and 708), or modified or unmodified variants thereof, wherein the first and/or second strand further comprise up to about 20 additional nucleotides.

[2987] A RNAi agent comprising a first and a second strand, wherein the sequence of the first and/or second strand is the sequence of a first and/or second strand of: AD-39818.1 (SEQ ID NOs: 282 and 709), or modified or unmodified variants thereof, wherein the first and/or second strand further comprise up to about 20 additional nucleotides.

[2988] A RNAi agent comprising a first and a second strand, wherein the sequence of the first and/or second strand is the sequence of a first and/or second strand of: AD-39824.1 (SEQ ID NOs: 283 and 710), or modified or unmodified variants thereof, wherein the first and/or second strand further comprise up to about 20 additional nucleotides.

[2989] A RNAi agent comprising a first and a second strand, wherein the sequence of the first and/or second strand is the sequence of a first and/or second strand of: AD-39783.1 (SEQ ID NOs: 284 and 711), or modified or unmodified variants thereof, wherein the first and/or second strand further comprise up to about 20 additional nucleotides.

[2990] A RNAi agent comprising a first and a second strand, wherein the sequence of the first and/or second strand is the sequence of a first and/or second strand of: AD-39789.1 (SEQ ID NOs: 285 and 712), or modified or unmodified variants thereof, wherein the first and/or second strand further comprise up to about 20 additional nucleotides.

[2991] A RNAi agent comprising a first and a second strand, wherein the sequence of the first and/or second strand is the sequence of a first and/or second strand of: AD-39795.1 (SEQ ID NOs: 286 and 713), or modified or unmodified variants thereof, wherein the first and/or second strand further comprise up to about 20 additional nucleotides.

[2992] A RNAi agent comprising a first and a second strand, wherein the sequence of the first and/or second strand is the sequence of a first and/or second strand of: AD-39801.1 (SEQ ID NOs: 287 and 714), or modified or unmodified variants thereof, wherein the first and/or second strand further comprise up to about 20 additional nucleotides.

[2993] A RNAi agent comprising a first and a second strand, wherein the sequence of the first and/or second strand is the sequence of a first and/or second strand of: AD-39807.1 (SEQ ID NOs: 288 and 715), or modified or unmodified variants thereof, wherein the first and/or second strand further comprise up to about 20 additional nucleotides.

[2994] A RNAi agent comprising a first and a second strand, wherein the sequence of the first and/or second strand is the sequence of a first and/or second strand of: AD-39813.1 (SEQ ID NOs: 289 and 716), or modified or unmodified variants thereof, wherein the first and/or second strand further comprise up to about 20 additional nucleotides.

[2995] A RNAi agent comprising a first and a second strand, wherein the sequence of the first and/or second strand is the sequence of a first and/or second strand of: AD-39819.1 (SEQ ID NOs: 290 and 717), or modified or unmodified variants thereof, wherein the first and/or second strand further comprise up to about 20 additional nucleotides.

[2996] A RNAi agent comprising a first and a second strand, wherein the sequence of the first and/or second strand is the sequence of a first and/or second strand of: AD-39825.1 (SEQ ID NOs: 291 and 718), or modified or unmodified variants thereof, wherein the first and/or second strand further comprise up to about 20 additional nucleotides.

[2997] A RNAi agent comprising a first and a second strand, wherein the sequence of the first and/or second strand is the sequence of a first and/or second strand of: AD-39831.1 (SEQ ID NOs: 292 and 719), or modified or unmodified variants thereof, wherein the first and/or second strand further comprise up to about 20 additional nucleotides.

[2998] A RNAi agent comprising a first and a second strand, wherein the sequence of the first and/or second strand is the sequence of a first and/or second strand of: AD-39837.1 (SEQ ID NOs: 293 and 720), or modified or unmodified variants thereof, wherein the first and/or second strand further comprise up to about 20 additional nucleotides.

[2999] A RNAi agent comprising a first and a second strand, wherein the sequence of the first and/or second strand is the sequence of a first and/or second strand of: AD-39843.1 (SEQ ID NOs: 294 and 721), or modified or unmodified variants thereof, wherein the first and/or second strand further comprise up to about 20 additional nucleotides.

[3000] A RNAi agent comprising a first and a second strand, wherein the sequence of the first and/or second strand is the sequence of a first and/or second strand of: AD-39849.1 (SEQ ID NOs: 295 and 722), or modified or unmodified variants thereof, wherein the first and/or second strand further comprise up to about 20 additional nucleotides.

[3001] A RNAi agent comprising a first and a second strand, wherein the sequence of the first and/or second strand is the sequence of a first and/or second strand of: AD-39855.1 (SEQ ID NOs: 296 and 723), or modified or unmodified variants thereof, wherein the first and/or second strand further comprise up to about 20 additional nucleotides.

[3002] A RNAi agent comprising a first and a second strand, wherein the sequence of the first and/or second strand is the sequence of a first and/or second strand of: AD-39861.1 (SEQ ID NOs: 297 and 724), or modified or unmodified variants thereof, wherein the first and/or second strand further comprise up to about 20 additional nucleotides.

[3003] A RNAi agent comprising a first and a second strand, wherein the sequence of the first and/or second strand is the sequence of a first and/or second strand of: AD-39867.1 (SEQ ID NOs: 298 and 725), or modified or unmodified variants thereof, wherein the first and/or second strand further comprise up to about 20 additional nucleotides.

[3004] A RNAi agent comprising a first and a second strand, wherein the sequence of the first and/or second strand is the sequence of a first and/or second strand of: AD-39826.1 (SEQ ID NOs: 299 and 726), or modified or unmodified variants thereof, wherein the first and/or second strand further comprise up to about 20 additional nucleotides.

[3005] A RNAi agent comprising a first and a second strand, wherein the sequence of the first and/or second strand is the sequence of a first and/or second strand of: AD-39832.1 (SEQ ID NOs: 300 and 727), or modified or unmodified variants thereof, wherein the first and/or second strand further comprise up to about 20 additional nucleotides.

[3006] A RNAi agent comprising a first and a second strand, wherein the sequence of the first and/or second strand is the sequence of a first and/or second strand of: AD-39838.1 (SEQ ID NOs: 301 and 728), or modified or unmodified variants thereof, wherein the first and/or second strand further comprise up to about 20 additional nucleotides.

[3007] A RNAi agent comprising a first and a second strand, wherein the sequence of the first and/or second strand is the sequence of a first and/or second strand of: AD-39844.1 (SEQ ID NOs: 302 and 729), or modified or unmodified variants thereof, wherein the first and/or second strand further comprise up to about 20 additional nucleotides.

[3008] A RNAi agent comprising a first and a second strand, wherein the sequence of the first and/or second strand is the sequence of a first and/or second strand of: AD-39850.1 (SEQ ID NOs: 303 and 730), or modified or unmodified variants thereof, wherein the first and/or second strand further comprise up to about 20 additional nucleotides.

[3009] A RNAi agent comprising a first and a second strand, wherein the sequence of the first and/or second strand is the sequence of a first and/or second strand of: AD-39856.1 (SEQ ID NOs: 304 and 731), or modified or unmodified variants thereof, wherein the first and/or second strand further comprise up to about 20 additional nucleotides.

[3010] A RNAi agent comprising a first and a second strand, wherein the sequence of the first and/or second strand is the sequence of a first and/or second strand of: AD-39862.1 (SEQ ID NOs: 305 and 732), or modified or unmodified variants thereof, wherein the first and/or second strand

[3011] A RNAi agent comprising a first and a second strand, wherein the sequence of the first and/or second strand is the sequence of a first and/or second strand of: AD-39868.1 (SEQ ID NOs: 306 and 733), or modified or unmodified variants thereof, wherein the first and/or second strand further comprise up to about 20 additional nucleotides.

[3012] A RNAi agent comprising a first and a second strand, wherein the sequence of the first and/or second strand is the sequence of a first and/or second strand of: AD-39827.1 (SEQ ID NOs: 307 and 734), or modified or unmodified variants thereof, wherein the first and/or second strand further comprise up to about 20 additional nucleotides.

[3013] A RNAi agent comprising a first and a second strand, wherein the sequence of the first and/or second strand is the sequence of a first and/or second strand of: AD-39833.1 (SEQ ID NOs: 308 and 735), or modified or unmodified variants thereof, wherein the first and/or second strand further comprise up to about 20 additional nucleotides.

[3014] A RNAi agent comprising a first and a second strand, wherein the sequence of the first and/or second strand is the sequence of a first and/or second strand of: AD-39839.1 (SEQ ID NOs: 309 and 736), or modified or unmodified variants thereof, wherein the first and/or second strand further comprise up to about 20 additional nucleotides.

[3015] A RNAi agent comprising a first and a second strand, wherein the sequence of the first and/or second strand is the sequence of a first and/or second strand of: AD-39845.1 (SEQ ID NOs: 310 and 737), or modified or unmodified variants thereof, wherein the first and/or second strand further comprise up to about 20 additional nucleotides.

[3016] A RNAi agent comprising a first and a second strand, wherein the sequence of the first and/or second strand is the sequence of a first and/or second strand of: AD-39851.1 (SEQ ID NOs: 311 and 738), or modified or unmodified variants thereof, wherein the first and/or second strand further comprise up to about 20 additional nucleotides.

[3017] A RNAi agent comprising a first and a second strand, wherein the sequence of the first and/or second strand is the sequence of a first and/or second strand of: AD-39857.1 (SEQ ID NOs: 312 and 739), or modified or unmodified variants thereof, wherein the first and/or second strand further comprise up to about 20 additional nucleotides.

[3018] A RNAi agent comprising a first and a second strand, wherein the sequence of the first and/or second strand is the sequence of a first and/or second strand of: AD-39863.1 (SEQ ID NOs: 313 and 740), or modified or unmodified variants thereof, wherein the first and/or second strand further comprise up to about 20 additional nucleotides.

[3019] A RNAi agent comprising a first and a second strand, wherein the sequence of the first and/or second strand is the sequence of a first and/or second strand of: AD-39869.1 (SEQ ID NOs: 314 and 741), or modified or unmodified variants thereof, wherein the first and/or second strand further comprise up to about 20 additional nucleotides.

[3020] A RNAi agent comprising a first and a second strand, wherein the sequence of the first and/or second strand is the sequence of a first and/or second strand of: AD-39828.1 (SEQ ID NOs: 315 and 742), or modified or unmodified variants thereof, wherein the first and/or second strand

[3021] A RNAi agent comprising a first and a second strand, wherein the sequence of the first and/or second strand is the sequence of a first and/or second strand of: AD-39834.1 (SEQ ID NOs: 316 and 743), or modified or unmodified variants thereof, wherein the first and/or second strand further comprise up to about 20 additional nucleotides.

[3022] A RNAi agent comprising a first and a second strand, wherein the sequence of the first and/or second strand is the sequence of a first and/or second strand of: AD-39840.1 (SEQ ID NOs: 317 and 744), or modified or unmodified variants thereof, wherein the first and/or second strand further comprise up to about 20 additional nucleotides.

[3023] A RNAi agent comprising a first and a second strand, wherein the sequence of the first and/or second strand is the sequence of a first and/or second strand of: AD-39846.1 (SEQ ID NOs: 318 and 745), or modified or unmodified variants thereof, wherein the first and/or second strand further comprise up to about 20 additional nucleotides.

[3024] A RNAi agent comprising a first and a second strand, wherein the sequence of the first and/or second strand is the sequence of a first and/or second strand of: AD-39852.1 (SEQ ID NOs: 319 and 746), or modified or unmodified variants thereof, wherein the first and/or second strand further comprise up to about 20 additional nucleotides.

[3025] A RNAi agent comprising a first and a second strand, wherein the sequence of the first and/or second strand is the sequence of a first and/or second strand of: AD-39858.1 (SEQ ID NOs: 320 and 747), or modified or unmodified variants thereof, wherein the first and/or second strand further comprise up to about 20 additional nucleotides.

[3026] A RNAi agent comprising a first and a second strand, wherein the sequence of the first and/or second strand is the sequence of a first and/or second strand of: AD-39864.1 (SEQ ID NOs: 321 and 748), or modified or unmodified variants thereof, wherein the first and/or second strand further comprise up to about 20 additional nucleotides.

[3027] A RNAi agent comprising a first and a second strand, wherein the sequence of the first and/or second strand is the sequence of a first and/or second strand of: AD-39870.1 (SEQ ID NOs: 322 and 749), or modified or unmodified variants thereof, wherein the first and/or second strand further comprise up to about 20 additional nucleotides.

[3028] A RNAi agent comprising a first and a second strand, wherein the sequence of the first and/or second strand is the sequence of a first and/or second strand of: AD-39829.1 (SEQ ID NOs: 323 and 750), or modified or unmodified variants thereof, wherein the first and/or second strand further comprise up to about 20 additional nucleotides.

[3029] A RNAi agent comprising a first and a second strand, wherein the sequence of the first and/or second strand is the sequence of a first and/or second strand of: AD-39835.1 (SEQ ID NOs: 324 and 751), or modified or unmodified variants thereof, wherein the first and/or second strand further comprise up to about 20 additional nucleotides.

[3030] A RNAi agent comprising a first and a second strand, wherein the sequence of the first and/or second strand is the sequence of a first and/or second strand of: AD-39841.1 (SEQ ID NOs: 325 and 752), or modified or unmodified variants thereof, wherein the first and/or second strand further comprise up to about 20 additional nucleotides.

[3031] A RNAi agent comprising a first and a second strand, wherein the sequence of the first and/or second strand is the sequence of a first and/or second strand of: AD-39853.1 (SEQ ID NOs: 326 and 753), or modified or unmodified variants thereof, wherein the first and/or second strand further comprise up to about 20 additional nucleotides.

[3032] A RNAi agent comprising a first and a second strand, wherein the sequence of the first and/or second strand is the sequence of a first and/or second strand of: AD-39859.1 (SEQ ID NOs: 327 and 754), or modified or unmodified variants thereof, wherein the first and/or second strand further comprise up to about 20 additional nucleotides.

[3033] A RNAi agent comprising a first and a second strand, wherein the sequence of the first and/or second strand is the sequence of a first and/or second strand of: AD-39865.1 (SEQ ID NOs: 328 and 755), or modified or unmodified variants thereof, wherein the first and/or second strand further comprise up to about 20 additional nucleotides.

[3034] A RNAi agent comprising a first and a second strand, wherein the sequence of the first and/or second strand is the sequence of a first and/or second strand of: AD-39871.1 (SEQ ID NOs: 329 and 756), or modified or unmodified variants thereof, wherein the first and/or second strand further comprise up to about 20 additional nucleotides.

[3035] A RNAi agent comprising a first and a second strand, wherein the sequence of the first and/or second strand is the sequence of a first and/or second strand of: AD-39830.1 (SEQ ID NOs: 330 and 757), or modified or unmodified variants thereof, wherein the first and/or second strand further comprise up to about 20 additional nucleotides.

[3036] A RNAi agent comprising a first and a second strand, wherein the sequence of the first and/or second strand is the sequence of a first and/or second strand of: AD-39836.1 (SEQ ID NOs: 331 and 758), or modified or unmodified variants thereof, wherein the first and/or second strand further comprise up to about 20 additional nucleotides.

[3037] A RNAi agent comprising a first and a second strand, wherein the sequence of the first and/or second strand is the sequence of a first and/or second strand of: AD-39842.1 (SEQ ID NOs: 332 and 759), or modified or unmodified variants thereof, wherein the first and/or second strand further comprise up to about 20 additional nucleotides.

[3038] A RNAi agent comprising a first and a second strand, wherein the sequence of the first and/or second strand is the sequence of a first and/or second strand of: AD-39848.1 (SEQ ID NOs: 333 and 760), or modified or unmodified variants thereof, wherein the first and/or second strand further comprise up to about 20 additional nucleotides.

[3039] A RNAi agent comprising a first and a second strand, wherein the sequence of the first and/or second strand is the sequence of a first and/or second strand of: AD-39854.1 (SEQ ID NOs: 334 and 761), or modified or unmodified variants thereof, wherein the first and/or second strand further comprise up to about 20 additional nucleotides.

[3040] A RNAi agent comprising a first and a second strand, wherein the sequence of the first and/or second strand is the sequence of a first and/or second strand of: AD-39860.1 (SEQ ID NOs: 335 and 762), or modified or unmodified variants thereof, wherein the first and/or second strand further comprise up to about 20 additional nucleotides.

[3041] A RNAi agent comprising a first and a second strand, wherein the sequence of the first and/or second strand is the sequence of a first and/or second strand of: AD-39866.1 (SEQ ID NOs: 336 and 763), or modified or unmodified variants thereof, wherein the first and/or second strand further comprise up to about 20 additional nucleotides.

[3042] A RNAi agent comprising a first and a second strand, wherein the sequence of the first and/or second strand is the sequence of a first and/or second strand of: AD-39992.1 (SEQ ID NOs: 337 and 764), or modified or unmodified variants thereof, wherein the first and/or second strand further comprise up to about 20 additional nucleotides.

[3043] A RNAi agent comprising a first and a second strand, wherein the sequence of the first and/or second strand is the sequence of a first and/or second strand of: AD-39998.1 (SEQ ID NOs: 338 and 765), or modified or unmodified variants thereof, wherein the first and/or second strand further comprise up to about 20 additional nucleotides.

[3044] A RNAi agent comprising a first and a second strand, wherein the sequence of the first and/or second strand is the sequence of a first and/or second strand of: AD-40004.1 (SEQ ID NOs: 339 and 766), or modified or unmodified variants thereof, wherein the first and/or second strand further comprise up to about 20 additional nucleotides.

[3045] A RNAi agent comprising a first and a second strand, wherein the sequence of the first and/or second strand is the sequence of a first and/or second strand of: AD-40010.1 (SEQ ID NOs: 340 and 767), or modified or unmodified variants thereof, wherein the first and/or second strand further comprise up to about 20 additional nucleotides.

[3046] A RNAi agent comprising a first and a second strand, wherein the sequence of the first and/or second strand is the sequence of a first and/or second strand of: AD-40016.1 (SEQ ID NOs: 341 and 768), or modified or unmodified variants thereof, wherein the first and/or second strand further comprise up to about 20 additional nucleotides.

[3047] A RNAi agent comprising a first and a second strand, wherein the sequence of the first and/or second strand is the sequence of a first and/or second strand of: AD-40022.1 (SEQ ID NOs: 342 and 769), or modified or unmodified variants thereof, wherein the first and/or second strand further comprise up to about 20 additional nucleotides.

[3048] A RNAi agent comprising a first and a second strand, wherein the sequence of the first and/or second strand is the sequence of a first and/or second strand of: AD-40028.1 (SEQ ID NOs: 343 and 770), or modified or unmodified variants thereof, wherein the first and/or second strand further comprise up to about 20 additional nucleotides.

[3049] A RNAi agent comprising a first and a second strand, wherein the sequence of the first and/or second strand is the sequence of a first and/or second strand of: AD-40034.1 (SEQ ID NOs: 344 and 771), or modified or unmodified variants thereof, wherein the first and/or second strand further comprise up to about 20 additional nucleotides.

[3050] A RNAi agent comprising a first and a second strand, wherein the sequence of the first and/or second strand is the sequence of a first and/or second strand of: AD-39999.1 (SEQ ID NOs: 345 and 772), or modified or unmodified variants thereof, wherein the first and/or second strand further comprise up to about 20 additional nucleotides.

[3051] A RNAi agent comprising a first and a second strand, wherein the sequence of the first and/or second strand is the sequence of a first and/or second strand of: AD-40005.1 (SEQ ID NOs: 346 and 773), or modified or unmodified variants thereof, wherein the first and/or second strand

[3052] A RNAi agent comprising a first and a second strand, wherein the sequence of the first and/or second strand is the sequence of a first and/or second strand of: AD-40011.1 (SEQ ID NOs: 347 and 774), or modified or unmodified variants thereof, wherein the first and/or second strand further comprise up to about 20 additional nucleotides.

[3053] A RNAi agent comprising a first and a second strand, wherein the sequence of the first and/or second strand is the sequence of a first and/or second strand of: AD-40017.1 (SEQ ID NOs: 348 and 775), or modified or unmodified variants thereof, wherein the first and/or second strand further comprise up to about 20 additional nucleotides.

[3054] A RNAi agent comprising a first and a second strand, wherein the sequence of the first and/or second strand is the sequence of a first and/or second strand of: AD-40029.1 (SEQ ID NOs: 349 and 776), or modified or unmodified variants thereof, wherein the first and/or second strand further comprise up to about 20 additional nucleotides.

[3055] A RNAi agent comprising a first and a second strand, wherein the sequence of the first and/or second strand is the sequence of a first and/or second strand of: AD-40035.1 (SEQ ID NOs: 350 and 777), or modified or unmodified variants thereof, wherein the first and/or second strand further comprise up to about 20 additional nucleotides.

[3056] A RNAi agent comprising a first and a second strand, wherein the sequence of the first and/or second strand is the sequence of a first and/or second strand of: AD-39994.1 (SEQ ID NOs: 351 and 778), or modified or unmodified variants thereof, wherein the first and/or second strand further comprise up to about 20 additional nucleotides.

[3057] A RNAi agent comprising a first and a second strand, wherein the sequence of the first and/or second strand is the sequence of a first and/or second strand of: AD-40000.1 (SEQ ID NOs: 352 and 779), or modified or unmodified variants thereof, wherein the first and/or second strand further comprise up to about 20 additional nucleotides.

[3058] A RNAi agent comprising a first and a second strand, wherein the sequence of the first and/or second strand is the sequence of a first and/or second strand of: AD-40006.1 (SEQ ID NOs: 353 and 780), or modified or unmodified variants thereof, wherein the first and/or second strand further comprise up to about 20 additional nucleotides.

[3059] A RNAi agent comprising a first and a second strand, wherein the sequence of the first and/or second strand is the sequence of a first and/or second strand of: AD-40012.1 (SEQ ID NOs: 354 and 781), or modified or unmodified variants thereof, wherein the first and/or second strand further comprise up to about 20 additional nucleotides.

[3060] A RNAi agent comprising a first and a second strand, wherein the sequence of the first and/or second strand is the sequence of a first and/or second strand of: AD-40018.1 (SEQ ID NOs: 355 and 782), or modified or unmodified variants thereof, wherein the first and/or second strand further comprise up to about 20 additional nucleotides.

[3061] A RNAi agent comprising a first and a second strand, wherein the sequence of the first and/or second strand is the sequence of a first and/or second strand of: AD-40024.1 (SEQ ID NOs: 356 and 783), or modified or unmodified variants thereof, wherein the first and/or second strand

[3062] A RNAi agent comprising a first and a second strand, wherein the sequence of the first and/or second strand is the sequence of a first and/or second strand of: AD-40030.1 (SEQ ID NOs: 357 and 784), or modified or unmodified variants thereof, wherein the first and/or second strand further comprise up to about 20 additional nucleotides.

[3063] A RNAi agent comprising a first and a second strand, wherein the sequence of the first and/or second strand is the sequence of a first and/or second strand of: AD-40036.1 (SEQ ID NOs: 358 and 785), or modified or unmodified variants thereof, wherein the first and/or second strand further comprise up to about 20 additional nucleotides.

[3064] A RNAi agent comprising a first and a second strand, wherein the sequence of the first and/or second strand is the sequence of a first and/or second strand of: AD-39995.1 (SEQ ID NOs: 359 and 786), or modified or unmodified variants thereof, wherein the first and/or second strand further comprise up to about 20 additional nucleotides.

[3065] A RNAi agent comprising a first and a second strand, wherein the sequence of the first and/or second strand is the sequence of a first and/or second strand of: AD-40001.1 (SEQ ID NOs: 360 and 787), or modified or unmodified variants thereof, wherein the first and/or second strand further comprise up to about 20 additional nucleotides.

[3066] A RNAi agent comprising a first and a second strand, wherein the sequence of the first and/or second strand is the sequence of a first and/or second strand of: AD-40007.1 (SEQ ID NOs: 361 and 788), or modified or unmodified variants thereof, wherein the first and/or second strand further comprise up to about 20 additional nucleotides.

[3067] A RNAi agent comprising a first and a second strand, wherein the sequence of the first and/or second strand is the sequence of a first and/or second strand of: AD-40013.1 (SEQ ID NOs: 362 and 789), or modified or unmodified variants thereof, wherein the first and/or second strand further comprise up to about 20 additional nucleotides.

[3068] A RNAi agent comprising a first and a second strand, wherein the sequence of the first and/or second strand is the sequence of a first and/or second strand of: AD-40019.1 (SEQ ID NOs: 363 and 790), or modified or unmodified variants thereof, wherein the first and/or second strand further comprise up to about 20 additional nucleotides.

[3069] A RNAi agent comprising a first and a second strand, wherein the sequence of the first and/or second strand is the sequence of a first and/or second strand of: AD-40025.1 (SEQ ID NOs: 364 and 791), or modified or unmodified variants thereof, wherein the first and/or second strand further comprise up to about 20 additional nucleotides.

[3070] A RNAi agent comprising a first and a second strand, wherein the sequence of the first and/or second strand is the sequence of a first and/or second strand of: AD-40031.1 (SEQ ID NOs: 365 and 792), or modified or unmodified variants thereof, wherein the first and/or second strand further comprise up to about 20 additional nucleotides.

[3071] A RNAi agent comprising a first and a second strand, wherein the sequence of the first and/or second strand is the sequence of a first and/or second strand of: AD-40037.1 (SEQ ID NOs: 366 and 793), or modified or unmodified variants thereof, wherein the first and/or second strand further comprise up to about 20 additional nucleotides.

[3072] A RNAi agent comprising a first and a second strand, wherein the sequence of the first and/or second strand is the sequence of a first and/or second strand of: AD-39996.1 (SEQ ID NOs: 367 and 794), or modified or unmodified variants thereof, wherein the first and/or second strand further comprise up to about 20 additional nucleotides.

[3073] A RNAi agent comprising a first and a second strand, wherein the sequence of the first and/or second strand is the sequence of a first and/or second strand of: AD-40002.1 (SEQ ID NOs: 368 and 795), or modified or unmodified variants thereof, wherein the first and/or second strand further comprise up to about 20 additional nucleotides.

[3074] A RNAi agent comprising a first and a second strand, wherein the sequence of the first and/or second strand is the sequence of a first and/or second strand of: AD-40008.1 (SEQ ID NOs: 369 and 796), or modified or unmodified variants thereof, wherein the first and/or second strand further comprise up to about 20 additional nucleotides.

[3075] A RNAi agent comprising a first and a second strand, wherein the sequence of the first and/or second strand is the sequence of a first and/or second strand of: AD-40014.1 (SEQ ID NOs: 370 and 797), or modified or unmodified variants thereof, wherein the first and/or second strand further comprise up to about 20 additional nucleotides.

[3076] A RNAi agent comprising a first and a second strand, wherein the sequence of the first and/or second strand is the sequence of a first and/or second strand of: AD-40020.1 (SEQ ID NOs: 371 and 798), or modified or unmodified variants thereof, wherein the first and/or second strand further comprise up to about 20 additional nucleotides.

[3077] A RNAi agent comprising a first and a second strand, wherein the sequence of the first and/or second strand is the sequence of a first and/or second strand of: AD-40026.1 (SEQ ID NOs: 372 and 799), or modified or unmodified variants thereof, wherein the first and/or second strand further comprise up to about 20 additional nucleotides.

[3078] A RNAi agent comprising a first and a second strand, wherein the sequence of the first and/or second strand is the sequence of a first and/or second strand of: AD-40032.1 (SEQ ID NOs: 373 and 800), or modified or unmodified variants thereof, wherein the first and/or second strand further comprise up to about 20 additional nucleotides.

[3079] A RNAi agent comprising a first and a second strand, wherein the sequence of the first and/or second strand is the sequence of a first and/or second strand of: AD-40038.1 (SEQ ID NOs: 374 and 801), or modified or unmodified variants thereof, wherein the first and/or second strand further comprise up to about 20 additional nucleotides.

[3080] A RNAi agent comprising a first and a second strand, wherein the sequence of the first and/or second strand is the sequence of a first and/or second strand of: AD-39997.1 (SEQ ID NOs: 375 and 802), or modified or unmodified variants thereof, wherein the first and/or second strand further comprise up to about 20 additional nucleotides.

[3081] A RNAi agent comprising a first and a second strand, wherein the sequence of the first and/or second strand is the sequence of a first and/or second strand of: AD-40009.1 (SEQ ID NOs: 376 and 803), or modified or unmodified variants thereof, wherein the first and/or second strand further comprise up to about 20 additional nucleotides.

[3082] A RNAi agent comprising a first and a second strand, wherein the sequence of the first and/or second strand is the sequence of a first and/or second strand of: AD-40015.1 (SEQ ID NOs: 377 and 804), or modified or unmodified variants thereof, wherein the first and/or second strand further comprise up to about 20 additional nucleotides.

[3083] A RNAi agent comprising a first and a second strand, wherein the sequence of the first and/or second strand is the sequence of a first and/or second strand of: AD-40021.1 (SEQ ID NOs: 378 and 805), or modified or unmodified variants thereof, wherein the first and/or second strand further comprise up to about 20 additional nucleotides.

[3084] A RNAi agent comprising a first and a second strand, wherein the sequence of the first and/or second strand is the sequence of a first and/or second strand of: AD-40027.1 (SEQ ID NOs: 379 and 806), or modified or unmodified variants thereof, wherein the first and/or second strand further comprise up to about 20 additional nucleotides.

[3085] A RNAi agent comprising a first and a second strand, wherein the sequence of the first and/or second strand is the sequence of a first and/or second strand of: AD-40033.1 (SEQ ID NOs: 380 and 807), or modified or unmodified variants thereof, wherein the first and/or second strand further comprise up to about 20 additional nucleotides.

[3086] A RNAi agent comprising a first and a second strand, wherein the sequence of the first and/or second strand is the sequence of a first and/or second strand of: AD-40039.1 (SEQ ID NOs: 381 and 808), or modified or unmodified variants thereof, wherein the first and/or second strand further comprise up to about 20 additional nucleotides.

[3087] A RNAi agent comprising a first and a second strand, wherein the sequence of the first and/or second strand is the sequence of a first and/or second strand of: AD-40045.1 (SEQ ID NOs: 382 and 809), or modified or unmodified variants thereof, wherein the first and/or second strand further comprise up to about 20 additional nucleotides.

[3088] A RNAi agent comprising a first and a second strand, wherein the sequence of the first and/or second strand is the sequence of a first and/or second strand of: AD-40051.1 (SEQ ID NOs: 383 and 810), or modified or unmodified variants thereof, wherein the first and/or second strand further comprise up to about 20 additional nucleotides.

[3089] A RNAi agent comprising a first and a second strand, wherein the sequence of the first and/or second strand is the sequence of a first and/or second strand of: AD-40057.1 (SEQ ID NOs: 384 and 811), or modified or unmodified variants thereof, wherein the first and/or second strand further comprise up to about 20 additional nucleotides.

[3090] A RNAi agent comprising a first and a second strand, wherein the sequence of the first and/or second strand is the sequence of a first and/or second strand of: AD-40063.1 (SEQ ID NOs: 385 and 812), or modified or unmodified variants thereof, wherein the first and/or second strand further comprise up to about 20 additional nucleotides.

[3091] A RNAi agent comprising a first and a second strand, wherein the sequence of the first and/or second strand is the sequence of a first and/or second strand of: AD-40069.1 (SEQ ID NOs: 386 and 813), or modified or unmodified variants thereof, wherein the first and/or second strand further comprise up to about 20 additional nucleotides.

[3092] A RNAi agent comprising a first and a second strand, wherein the sequence of the first and/or second strand is the sequence of a first and/or second strand of: AD-40075.1 (SEQ ID NOs: 387 and 814), or modified or unmodified variants thereof, wherein the first and/or second strand

[3093] A RNAi agent comprising a first and a second strand, wherein the sequence of the first and/or second strand is the sequence of a first and/or second strand of: AD-40081.1 (SEQ ID NOs: 388 and 815), or modified or unmodified variants thereof, wherein the first and/or second strand further comprise up to about 20 additional nucleotides.

[3094] A RNAi agent comprising a first and a second strand, wherein the sequence of the first and/or second strand is the sequence of a first and/or second strand of: AD-40040.1 (SEQ ID NOs: 389 and 816), or modified or unmodified variants thereof, wherein the first and/or second strand further comprise up to about 20 additional nucleotides.

[3095] A RNAi agent comprising a first and a second strand, wherein the sequence of the first and/or second strand is the sequence of a first and/or second strand of: AD-40046.1 (SEQ ID NOs: 390 and 817), or modified or unmodified variants thereof, wherein the first and/or second strand further comprise up to about 20 additional nucleotides.

[3096] A RNAi agent comprising a first and a second strand, wherein the sequence of the first and/or second strand is the sequence of a first and/or second strand of: AD-40052.1 (SEQ ID NOs: 391 and 818), or modified or unmodified variants thereof, wherein the first and/or second strand further comprise up to about 20 additional nucleotides.

[3097] A RNAi agent comprising a first and a second strand, wherein the sequence of the first and/or second strand is the sequence of a first and/or second strand of: AD-40058.1 (SEQ ID NOs: 392 and 819), or modified or unmodified variants thereof, wherein the first and/or second strand further comprise up to about 20 additional nucleotides.

[3098] A RNAi agent comprising a first and a second strand, wherein the sequence of the first and/or second strand is the sequence of a first and/or second strand of: AD-40064.1 (SEQ ID NOs: 393 and 820), or modified or unmodified variants thereof, wherein the first and/or second strand further comprise up to about 20 additional nucleotides.

[3099] A RNAi agent comprising a first and a second strand, wherein the sequence of the first and/or second strand is the sequence of a first and/or second strand of: AD-40070.1 (SEQ ID NOs: 394 and 821), or modified or unmodified variants thereof, wherein the first and/or second strand further comprise up to about 20 additional nucleotides.

[3100] A RNAi agent comprising a first and a second strand, wherein the sequence of the first and/or second strand is the sequence of a first and/or second strand of: AD-40076.1 (SEQ ID NOs: 395 and 822), or modified or unmodified variants thereof, wherein the first and/or second strand further comprise up to about 20 additional nucleotides.

[3101] A RNAi agent comprising a first and a second strand, wherein the sequence of the first and/or second strand is the sequence of a first and/or second strand of: AD-40082.1 (SEQ ID NOs: 396 and 823), or modified or unmodified variants thereof, wherein the first and/or second strand further comprise up to about 20 additional nucleotides.

[3102] A RNAi agent comprising a first and a second strand, wherein the sequence of the first and/or second strand is the sequence of a first and/or second strand of: AD-40041.1 (SEQ ID NOs: 397 and 824), or modified or unmodified variants thereof, wherein the first and/or second strand

[3103] A RNAi agent comprising a first and a second strand, wherein the sequence of the first and/or second strand is the sequence of a first and/or second strand of: AD-40047.1 (SEQ ID NOs: 398 and 825), or modified or unmodified variants thereof, wherein the first and/or second strand further comprise up to about 20 additional nucleotides.

[3104] A RNAi agent comprising a first and a second strand, wherein the sequence of the first and/or second strand is the sequence of a first and/or second strand of: AD-40053.1 (SEQ ID NOs: 399 and 826), or modified or unmodified variants thereof, wherein the first and/or second strand further comprise up to about 20 additional nucleotides.

[3105] A RNAi agent comprising a first and a second strand, wherein the sequence of the first and/or second strand is the sequence of a first and/or second strand of: AD-40059.1 (SEQ ID NOs: 400 and 827), or modified or unmodified variants thereof, wherein the first and/or second strand further comprise up to about 20 additional nucleotides.

[3106] A RNAi agent comprising a first and a second strand, wherein the sequence of the first and/or second strand is the sequence of a first and/or second strand of: AD-40065.1 (SEQ ID NOs: 401 and 828), or modified or unmodified variants thereof, wherein the first and/or second strand further comprise up to about 20 additional nucleotides.

[3107] A RNAi agent comprising a first and a second strand, wherein the sequence of the first and/or second strand is the sequence of a first and/or second strand of: AD-40071.1 (SEQ ID NOs: 402 and 829), or modified or unmodified variants thereof, wherein the first and/or second strand further comprise up to about 20 additional nucleotides.

[3108] A RNAi agent comprising a first and a second strand, wherein the sequence of the first and/or second strand is the sequence of a first and/or second strand of: AD-40077.1 (SEQ ID NOs: 403 and 830), or modified or unmodified variants thereof, wherein the first and/or second strand further comprise up to about 20 additional nucleotides.

[3109] A RNAi agent comprising a first and a second strand, wherein the sequence of the first and/or second strand is the sequence of a first and/or second strand of: AD-40083.1 (SEQ ID NOs: 404 and 831), or modified or unmodified variants thereof, wherein the first and/or second strand further comprise up to about 20 additional nucleotides.

[3110] A RNAi agent comprising a first and a second strand, wherein the sequence of the first and/or second strand is the sequence of a first and/or second strand of: AD-40042.1 (SEQ ID NOs: 405 and 832), or modified or unmodified variants thereof, wherein the first and/or second strand further comprise up to about 20 additional nucleotides.

[3111] A RNAi agent comprising a first and a second strand, wherein the sequence of the first and/or second strand is the sequence of a first and/or second strand of: AD-40048.1 (SEQ ID NOs: 406 and 833), or modified or unmodified variants thereof, wherein the first and/or second strand further comprise up to about 20 additional nucleotides.

[3112] A RNAi agent comprising a first and a second strand, wherein the sequence of the first and/or second strand is the sequence of a first and/or second strand of: AD-40054.1 (SEQ ID NOs: 407 and 834), or modified or unmodified variants thereof, wherein the first and/or second strand further comprise up to about 20 additional nucleotides.

[3113] A RNAi agent comprising a first and a second strand, wherein the sequence of the first and/or second strand is the sequence of a first and/or second strand of: AD-40060.1 (SEQ ID NOs: 408 and 835), or modified or unmodified variants thereof, wherein the first and/or second strand further comprise up to about 20 additional nucleotides.

[3114] A RNAi agent comprising a first and a second strand, wherein the sequence of the first and/or second strand is the sequence of a first and/or second strand of: AD-40066.1 (SEQ ID NOs: 409 and 836), or modified or unmodified variants thereof, wherein the first and/or second strand further comprise up to about 20 additional nucleotides.

[3115] A RNAi agent comprising a first and a second strand, wherein the sequence of the first and/or second strand is the sequence of a first and/or second strand of: AD-40072.1 (SEQ ID NOs: 410 and 837), or modified or unmodified variants thereof, wherein the first and/or second strand further comprise up to about 20 additional nucleotides.

[3116] A RNAi agent comprising a first and a second strand, wherein the sequence of the first and/or second strand is the sequence of a first and/or second strand of: AD-40078.1 (SEQ ID NOs: 411 and 838), or modified or unmodified variants thereof, wherein the first and/or second strand further comprise up to about 20 additional nucleotides.

[3117] A RNAi agent comprising a first and a second strand, wherein the sequence of the first and/or second strand is the sequence of a first and/or second strand of: AD-40084.1 (SEQ ID NOs: 412 and 839), or modified or unmodified variants thereof, wherein the first and/or second strand further comprise up to about 20 additional nucleotides.

[3118] A RNAi agent comprising a first and a second strand, wherein the sequence of the first and/or second strand is the sequence of a first and/or second strand of: AD-40043.1 (SEQ ID NOs: 413 and 840), or modified or unmodified variants thereof, wherein the first and/or second strand further comprise up to about 20 additional nucleotides.

[3119] A RNAi agent comprising a first and a second strand, wherein the sequence of the first and/or second strand is the sequence of a first and/or second strand of: AD-40049.1 (SEQ ID NOs: 414 and 841), or modified or unmodified variants thereof, wherein the first and/or second strand further comprise up to about 20 additional nucleotides.

[3120] A RNAi agent comprising a first and a second strand, wherein the sequence of the first and/or second strand is the sequence of a first and/or second strand of: AD-40055.1 (SEQ ID NOs: 415 and 842), or modified or unmodified variants thereof, wherein the first and/or second strand further comprise up to about 20 additional nucleotides.

[3121] A RNAi agent comprising a first and a second strand, wherein the sequence of the first and/or second strand is the sequence of a first and/or second strand of: AD-40061.1 (SEQ ID NOs: 416 and 843), or modified or unmodified variants thereof, wherein the first and/or second strand further comprise up to about 20 additional nucleotides.

[3122] A RNAi agent comprising a first and a second strand, wherein the sequence of the first and/or second strand is the sequence of a first and/or second strand of: AD-40067.1 (SEQ ID NOs: 417 and 844), or modified or unmodified variants thereof, wherein the first and/or second strand further comprise up to about 20 additional nucleotides.

[3123] A RNAi agent comprising a first and a second strand, wherein the sequence of the first and/or second strand is the sequence of a first and/or second strand of: AD-40073.1 (SEQ ID NOs: 418 and 845), or modified or unmodified variants thereof, wherein the first and/or second strand further comprise up to about 20 additional nucleotides.

[3124] A RNAi agent comprising a first and a second strand, wherein the sequence of the first and/or second strand is the sequence of a first and/or second strand of: AD-40079.1 (SEQ ID NOs: 419 and 846), or modified or unmodified variants thereof, wherein the first and/or second strand further comprise up to about 20 additional nucleotides.

[3125] A RNAi agent comprising a first and a second strand, wherein the sequence of the first and/or second strand is the sequence of a first and/or second strand of: AD-40085.1 (SEQ ID NOs: 420 and 847), or modified or unmodified variants thereof, wherein the first and/or second strand further comprise up to about 20 additional nucleotides.

[3126] A RNAi agent comprising a first and a second strand, wherein the sequence of the first and/or second strand is the sequence of a first and/or second strand of: AD-40044.1 (SEQ ID NOs: 421 and 848), or modified or unmodified variants thereof, wherein the first and/or second strand further comprise up to about 20 additional nucleotides.

[3127] A RNAi agent comprising a first and a second strand, wherein the sequence of the first and/or second strand is the sequence of a first and/or second strand of: AD-40050.1 (SEQ ID NOs: 422 and 849), or modified or unmodified variants thereof, wherein the first and/or second strand further comprise up to about 20 additional nucleotides.

[3128] A RNAi agent comprising a first and a second strand, wherein the sequence of the first and/or second strand is the sequence of a first and/or second strand of: AD-40056.1 (SEQ ID NOs: 423 and 850), or modified or unmodified variants thereof, wherein the first and/or second strand further comprise up to about 20 additional nucleotides.

[3129] A RNAi agent comprising a first and a second strand, wherein the sequence of the first and/or second strand is the sequence of a first and/or second strand of: AD-40062.1 (SEQ ID NOs: 424 and 851), or modified or unmodified variants thereof, wherein the first and/or second strand further comprise up to about 20 additional nucleotides.

[3130] A RNAi agent comprising a first and a second strand, wherein the sequence of the first and/or second strand is the sequence of a first and/or second strand of: AD-40068.1 (SEQ ID NOs: 425 and 852), or modified or unmodified variants thereof, wherein the first and/or second strand further comprise up to about 20 additional nucleotides.

[3131] A RNAi agent comprising a first and a second strand, wherein the sequence of the first and/or second strand is the sequence of a first and/or second strand of: AD-40074.1 (SEQ ID NOs: 426 and 853), or modified or unmodified variants thereof, wherein the first and/or second strand further comprise up to about 20 additional nucleotides.

[3132] A RNAi agent comprising a first and a second strand, wherein the sequence of the first and/or second strand is the sequence of a first and/or second strand of: AD-40080.1 (SEQ ID NOs: 427 and 854), or modified or unmodified variants thereof, wherein the first and/or second strand further comprise up to about 20 additional nucleotides.

[3133] A RNAi agent comprising a first and a second strand, wherein the sequence of the first and/or second strand is the sequence of a first and/or second strand of: AD-39720.1 (SEQ ID NOs: 1716 and 1754), or modified or unmodified variants thereof, wherein the first and/or second strand further comprise up to about 20 additional nucleotides.

[3134] A RNAi agent comprising a first and a second strand, wherein the sequence of the first and/or second strand is the sequence of a first and/or second strand of: AD-39706.1 (SEQ ID NOs: 1717 and 1755), or modified or unmodified variants thereof, wherein the first and/or second strand further comprise up to about 20 additional nucleotides.

[3135] A RNAi agent comprising a first and a second strand, wherein the sequence of the first and/or second strand is the sequence of a first and/or second strand of: AD-39712.1 (SEQ ID NOs: 1718 and 1756), or modified or unmodified variants thereof, wherein the first and/or second strand further comprise up to about 20 additional nucleotides.

[3136] A RNAi agent comprising a first and a second strand, wherein the sequence of the first and/or second strand is the sequence of a first and/or second strand of: AD-39760.1 (SEQ ID NOs: 1719 and 1757), or modified or unmodified variants thereof, wherein the first and/or second strand further comprise up to about 20 additional nucleotides.

[3137] A RNAi agent comprising a first and a second strand, wherein the sequence of the first and/or second strand is the sequence of a first and/or second strand of: AD-39732.1 (SEQ ID NOs: 1720 and 1758), or modified or unmodified variants thereof, wherein the first and/or second strand further comprise up to about 20 additional nucleotides.

[3138] A RNAi agent comprising a first and a second strand, wherein the sequence of the first and/or second strand is the sequence of a first and/or second strand of: AD-35541.4 (SEQ ID NOs: 1721 and 1759), or modified or unmodified variants thereof, wherein the first and/or second strand further comprise up to about 20 additional nucleotides.

[3139] A RNAi agent comprising a first and a second strand, wherein the sequence of the first and/or second strand is the sequence of a first and/or second strand of: AD-39735.1 or hs_KRAS_{—} 321_A22S26 (SEQ ID NOs: 1722 and 1760), or modified or unmodified variants thereof, wherein the first and/or second strand further comprise up to about 20 additional nucleotides.

[3140] A RNAi agent comprising a first and a second strand, wherein the sequence of the first and/or second strand is the sequence of a first and/or second strand of: AD-39741.1, or modified or unmodified variants thereof, wherein the first and/or second strand further comprise up to about 20 additional nucleotides.

[3141] A RNAi agent comprising a first and a second strand, wherein the sequence of the first and/or second strand is the sequence of a first and/or second strand of: hs_KRAS_{—}322_A22S26 (SEQ ID NOs: 1723 and 1761), or modified or unmodified variants thereof, wherein the first and/or second strand further comprise up to about 20 additional nucleotides.

[3142] A RNAi agent comprising a first and a second strand, wherein the sequence of the first and/or second strand is the sequence of a first and/or second strand of: AD-39778.1 (SEQ ID NOs: 1724 and 1762), or modified or unmodified variants thereof, wherein the first and/or second strand further comprise up to about 20 additional nucleotides.

[3143] A RNAi agent comprising a first and a second strand, wherein the sequence of the first and/or second strand is the sequence of a first and/or second strand of: AD-39790.1 (SEQ ID NOs: 1725 and 1763), or modified or unmodified variants thereof, wherein the first and/or second strand further comprise up to about 20 additional nucleotides.

[3144] A RNAi agent comprising a first and a second strand, wherein the sequence of the first and/or second strand is the sequence of a first and/or second strand of: AD-39822.1 (SEQ ID NOs: 1726 and 1764), or modified or unmodified variants thereof, wherein the first and/or second strand further comprise up to about 20 additional nucleotides.

[3145] A RNAi agent comprising a first and a second strand, wherein the sequence of the first and/or second strand is the sequence of a first and/or second strand of: AD-35609.4 (SEQ ID NOs: 1727 and 1765), or modified or unmodified variants thereof, wherein the first and/or second strand further comprise up to about 20 additional nucleotides.

[3146] A RNAi agent comprising a first and a second strand, wherein the sequence of the first and/or second strand is the sequence of a first and/or second strand of: AD-35581.4 (SEQ ID NOs: 1728 and 1766), or modified or unmodified variants thereof, wherein the first and/or second strand further comprise up to about 20 additional nucleotides.

[3147] A RNAi agent comprising a first and a second strand, wherein the sequence of the first and/or second strand is the sequence of a first and/or second strand of: AD-39845.1 (SEQ ID NOs: 1729 and 1767), or modified or unmodified variants thereof, wherein the first and/or second strand further comprise up to about 20 additional nucleotides.

[3148] A RNAi agent comprising a first and a second strand, wherein the sequence of the first and/or second strand is the sequence of a first and/or second strand of: AD-39858.1 (SEQ ID NOs: 1730 and 1768), or modified or unmodified variants thereof, wherein the first and/or second strand further comprise up to about 20 additional nucleotides.

[3149] A RNAi agent comprising a first and a second strand, wherein the sequence of the first and/or second strand is the sequence of a first and/or second strand of: AD-39870.1 (SEQ ID NOs: 1731 and 1769), or modified or unmodified variants thereof, wherein the first and/or second strand further comprise up to about 20 additional nucleotides.

[3150] A RNAi agent comprising a first and a second strand, wherein the sequence of the first and/or second strand is the sequence of a first and/or second strand of: AD-35576.4 (SEQ ID NOs: 1732 and 1770), or modified or unmodified variants thereof, wherein the first and/or second strand further comprise up to about 20 additional nucleotides.

[3151] A RNAi agent comprising a first and a second strand, wherein the sequence of the first and/or second strand is the sequence of a first and/or second strand of: AD-35588.4 (SEQ ID NOs: 1733 and 1771), or modified or unmodified variants thereof, wherein the first and/or second strand further comprise up to about 20 additional nucleotides.

[3152] A RNAi agent comprising a first and a second strand, wherein the sequence of the first and/or second strand is the sequence of a first and/or second strand of: AD-35600.1 (SEQ ID NOs: 1734 and 1772), or modified or unmodified variants thereof, wherein the first and/or second strand further comprise up to about 20 additional nucleotides.

[3153] A RNAi agent comprising a first and a second strand, wherein the sequence of the first and/or second strand is the sequence of a first and/or second strand of: AD-35606.1 (SEQ ID NOs: 1735 and 1773), or modified or unmodified variants thereof, wherein the first and/or second strand further comprise up to about 20 additional nucleotides.

[3154] A RNAi agent comprising a first and a second strand, wherein the sequence of the first and/or second strand is the sequence of a first and/or second strand of: AD-38151.1 (SEQ ID NOs: 1736 and 1774), or modified or unmodified variants thereof, wherein the first and/or second strand further comprise up to about 20 additional nucleotides.

[3155] A RNAi agent comprising a first and a second strand, wherein the sequence of the first and/or second strand is the sequence of a first and/or second strand of: AD-38163.1 (SEQ ID NOs: 1737 and 1775), or modified or unmodified variants thereof, wherein the first and/or second strand further comprise up to about 20 additional nucleotides.

[3156] A RNAi agent comprising a first and a second strand, wherein the sequence of the first and/or second strand is the sequence of a first and/or second strand of: AD-39999.1 (SEQ ID NOs: 1738 and 1776), or modified or unmodified variants thereof, wherein the first and/or second strand further comprise up to about 20 additional nucleotides.

[3157] A RNAi agent comprising a first and a second strand, wherein the sequence of the first and/or second strand is the sequence of a first and/or second strand of: AD-38159.1 or hs_KRAS_{—} 528_A22S26 (SEQ ID NOs: 1739 and 1777), or modified or unmodified variants thereof, wherein the first and/or second strand further comprise up to about 20 additional nucleotides.

[3158] A RNAi agent comprising a first and a second strand, wherein the sequence of the first and/or second strand is the sequence of a first and/or second strand of: AD-38130.1 or hs_KRAS_{—} 531_A22S26 (SEQ ID NOs: 1740 and 1778), or modified or unmodified variants thereof, wherein the first and/or second strand further comprise up to about 20 additional nucleotides.

[3159] A RNAi agent comprising a first and a second strand, wherein the sequence of the first and/or second strand is the sequence of a first and/or second strand of: AD-38136.1 (SEQ ID NOs: 1741 and 1779), or modified or unmodified variants thereof, wherein the first and/or second strand further comprise up to about 20 additional nucleotides.

[3160] A RNAi agent comprising a first and a second strand, wherein the sequence of the first and/or second strand is the sequence of a first and/or second strand of: AD-40036.1 (SEQ ID NOs: 1742 and 1780), or modified or unmodified variants thereof, wherein the first and/or second strand further comprise up to about 20 additional nucleotides.

[3161] A RNAi agent comprising a first and a second strand, wherein the sequence of the first and/or second strand is the sequence of a first and/or second strand of: AD-40008.1 (SEQ ID NOs: 1743 and 1781), or modified or unmodified variants thereof, wherein the first and/or second strand further comprise up to about 20 additional nucleotides.

[3162] A RNAi agent comprising a first and a second strand, wherein the sequence of the first and/or second strand is the sequence of a first and/or second strand of: AD-40021.1 (SEQ ID NOs: 1744 and 1782), or modified or unmodified variants thereof, wherein the first and/or second strand further comprise up to about 20 additional nucleotides.

[3163] A RNAi agent comprising a first and a second strand, wherein the sequence of the first and/or second strand is the sequence of a first and/or second strand of: AD-40077.1 (SEQ ID NOs: 1745 and 1783), or modified or unmodified variants thereof, wherein the first and/or second strand further comprise up to about 20 additional nucleotides.

[3164] A RNAi agent comprising a first and a second strand, wherein the sequence of the first and/or second strand is the sequence of a first and/or second strand of: AD-40072.1 (SEQ ID NOs: 1746 and 1784), or modified or unmodified variants thereof, wherein the first and/or second strand further comprise up to about 20 additional nucleotides.

[3165] A RNAi agent comprising a first and a second strand, wherein the sequence of the first and/or second strand is the sequence of a first and/or second strand of: AD-40061.1 (SEQ ID NOs: 1747 and 1785), or modified or unmodified variants thereof, wherein the first and/or second strand further comprise up to about 20 additional nucleotides.

[3166] A RNAi agent comprising a first and a second strand, wherein the sequence of the first and/or second strand is the sequence of a first and/or second strand of: AD-40068.1 (SEQ ID NOs: 1748 and 1786), or modified or unmodified variants thereof, wherein the first and/or second strand further comprise up to about 20 additional nucleotides.

[3167] A RNAi agent comprising a first and a second strand, wherein the sequence of the first and/or second strand is the sequence of a first and/or second strand of: AD-38131.1 (SEQ ID NOs: 1749 and 1787), or modified or unmodified variants thereof, wherein the first and/or second strand further comprise up to about 20 additional nucleotides.

[3168] A RNAi agent comprising a first and a second strand, wherein the sequence of the first and/or second strand is the sequence of a first and/or second strand of: AD-38167.1 (SEQ ID NOs: 1750 and 1788), or modified or unmodified variants thereof, wherein the first and/or second strand further comprise up to about 20 additional nucleotides.

[3169] A RNAi agent comprising a first and a second strand, wherein the sequence of the first and/or second strand is the sequence of a first and/or second strand of: hs_KRAS 1273_A22S26 (SEQ ID NOs: 1751 and 1789), or modified or unmodified variants thereof, wherein the first and/or second strand further comprise up to about 20 additional nucleotides.

[3170] A RNAi agent comprising a first and a second strand, wherein the sequence of the first and/or second strand is the sequence of a first and/or second strand of: hs_KRAS 2892_A37S26 (SEQ ID NOs: 1752 and 1790), or modified or unmodified variants thereof, wherein the first and/or second strand further comprise up to about 20 additional nucleotides.

[3171] A RNAi agent comprising a first and a second strand, wherein the sequence of the first and/or second strand is the sequence of a first and/or second strand of: hs_KRAS 4731_A22S26 (SEQ ID NOs: 1753 and 1791), or modified or unmodified variants thereof, wherein the first and/or second strand further comprise up to about 20 additional nucleotides.

[3172] In various embodiments, the disclosure comprises a RNAi agent comprising a sense and an antisense strand, wherein the antisense strand comprises at least 15 contiguous nucleotides differing by 0, 1, 2, or 3 nt from the antisense strand of any RNAi agent disclosed herein, or modified or unmodified variants thereof, wherein the antisense strand optionally further comprises 0, 1, 2, 3, 4, 5, 6, 7, 8, 9, or 10 or more nt (or any range thereof, e.g., 0-1, 1-2, 1-3, 1-4 nt, etc.).

[3173] In one embodiment, the disclosure comprises any one or more RNAi agent listed herein.

[3174] Specific embodiments wherein the sequences of the first and/or second strands are the sequences of the first and/or second strand of a RNAi agent disclosed herein, further comprising up to about 20 additional nucleotides

[3175] In one embodiment, the present disclosure pertains to a composition comprising any one or more of: a RNAi agent comprising a first and a second strand, wherein the sequence of the first and/or second strand comprise a sequence of 15 contiguous nt from the sequence of a first and/or second strand of any RNAi agent from any of Tables 1 to 6, or modified and unmodified variants thereof.

[3176] Thus, in various embodiments, the present disclosure pertains to a composition comprising any one or more of the following:

[3177] A RNAi agent comprising a first and a second strand, wherein the sequence of the first and/or second strand comprise a sequence of 15 contiguous nt from the sequence of a first and/or second strand of: AD-35523.3 (SEQ ID NOs: 1 and 428), or a modified or unmodified variant thereof.

[3178] A RNAi agent comprising a first and a second strand, wherein the sequence of the first and/or second strand comprise a sequence of 15 contiguous nt from the sequence of a first and/or second strand of: AD-35529.1 (SEQ ID NOs: 2 and 429), or a modified or unmodified variant thereof.

[3179] A RNAi agent comprising a first and a second strand, wherein the sequence of the first and/or second strand comprise a sequence of 15 contiguous nt from the sequence of a first and/or second strand of: AD-35535.4 (SEQ ID NOs: 3 and 430), or a modified or unmodified variant thereof.

[3180] A RNAi agent comprising a first and a second strand, wherein the sequence of the first and/or second strand comprise a sequence of 15 contiguous nt from the sequence of a first and/or second strand of: AD-35541.4 (SEQ ID NOs: 4 and 431), or a modified or unmodified variant thereof.

[3181] A RNAi agent comprising a first and a second strand, wherein the sequence of the first and/or second strand comprise a sequence of 15 contiguous nt from the sequence of a first and/or second strand of: AD-35547.4 (SEQ ID NOs: 5 and 432), or a modified or unmodified variant thereof.

[3182] A RNAi agent comprising a first and a second strand, wherein the sequence of the first and/or second strand comprise a sequence of 15 contiguous nt from the sequence of a first and/or second strand of: AD-35553.4 (SEQ ID NOs: 6 and 433), or a modified or unmodified variant thereof.

[3183] A RNAi agent comprising a first and a second strand, wherein the sequence of the first and/or second strand comprise a sequence of 15 contiguous nt from the sequence of a first and/or second strand of: AD-35559.4 (SEQ ID NOs: 7 and 434), or a modified or unmodified variant thereof.

[3184] A RNAi agent comprising a first and a second strand, wherein the sequence of the first and/or second strand comprise a sequence of 15 contiguous nt from the sequence of a first and/or second strand of: AD-35565.4 (SEQ ID NOs: 8 and 435), or a modified or unmodified variant thereof.

[3185] A RNAi agent comprising a first and a second strand, wherein the sequence of the first and/or second strand comprise a sequence of 15 contiguous nt from the sequence of a first and/or second strand of: AD-35524.4 (SEQ ID NOs: 9 and 436), or a modified or unmodified variant thereof.

[3186] A RNAi agent comprising a first and a second strand, wherein the sequence of the first and/or second strand comprise a sequence of 15 contiguous nt from the sequence of a first and/or second strand of: AD-35530.4 (SEQ ID NOs: 10 and 437), or a modified or unmodified variant thereof.

[3187] A RNAi agent comprising a first and a second strand, wherein the sequence of the first and/or second strand comprise a sequence of 15 contiguous nt from the sequence of a first and/or second strand of: AD-35536.4 (SEQ ID NOs: 11 and 438), or a modified or unmodified variant thereof.

[3188] A RNAi agent comprising a first and a second strand, wherein the sequence of the first and/or second strand comprise a sequence of 15 contiguous nt from the sequence of a first and/or second strand of: AD-35542.4 (SEQ ID NOs: 12 and 439), or a modified or unmodified variant thereof.

[3189] A RNAi agent comprising a first and a second strand, wherein the sequence of the first and/or second strand comprise a sequence of 15 contiguous nt from the sequence of a first and/or second strand of: AD-35548.4 (SEQ ID NOs: 13 and 440), or a modified or unmodified variant thereof.

[3190] A RNAi agent comprising a first and a second strand, wherein the sequence of the first and/or second strand comprise a sequence of 15 contiguous nt from the sequence of a first and/or second strand of: AD-35554.4 (SEQ ID NOs: 14 and 441), or a modified or unmodified variant thereof.

[3191] A RNAi agent comprising a first and a second strand, wherein the sequence of the first and/or second strand comprise a sequence of 15 contiguous nt from the sequence of a first and/or second strand of: AD-35560.2 (SEQ ID NOs: 15 and 442), or a modified or unmodified variant thereof.

[3192] A RNAi agent comprising a first and a second strand, wherein the sequence of the first and/or second strand comprise a sequence of 15 contiguous nt from the sequence of a first and/or second strand of: AD-35566.4 (SEQ ID NOs: 16 and 443), or a modified or unmodified variant thereof.

[3193] A RNAi agent comprising a first and a second strand, wherein the sequence of the first and/or second strand comprise a sequence of 15 contiguous nt from the sequence of a first and/or second strand of: AD-35525.2 (SEQ ID NOs: 17 and 444), or a modified or unmodified variant thereof.

[3194] A RNAi agent comprising a first and a second strand, wherein the sequence of the first second strand of: AD-35531.4 (SEQ ID NOs: 18 and 445), or a modified or unmodified variant thereof.

[3195] A RNAi agent comprising a first and a second strand, wherein the sequence of the first and/or second strand comprise a sequence of 15 contiguous nt from the sequence of a first and/or second strand of: AD-35537.4 (SEQ ID NOs: 19 and 446), or a modified or unmodified variant thereof.

[3196] A RNAi agent comprising a first and a second strand, wherein the sequence of the first and/or second strand comprise a sequence of 15 contiguous nt from the sequence of a first and/or second strand of: AD-35543.2 (SEQ ID NOs: 20 and 447), or a modified or unmodified variant thereof.

[3197] A RNAi agent comprising a first and a second strand, wherein the sequence of the first and/or second strand comprise a sequence of 15 contiguous nt from the sequence of a first and/or second strand of: AD-35549.4 (SEQ ID NOs: 21 and 448), or a modified or unmodified variant thereof.

[3198] A RNAi agent comprising a first and a second strand, wherein the sequence of the first and/or second strand comprise a sequence of 15 contiguous nt from the sequence of a first and/or second strand of: AD-35555.4 (SEQ ID NOs: 22 and 449), or a modified or unmodified variant thereof.

[3199] A RNAi agent comprising a first and a second strand, wherein the sequence of the first and/or second strand comprise a sequence of 15 contiguous nt from the sequence of a first and/or second strand of: AD-35561.4 (SEQ ID NOs: 23 and 450), or a modified or unmodified variant thereof.

[3200] A RNAi agent comprising a first and a second strand, wherein the sequence of the first and/or second strand comprise a sequence of 15 contiguous nt from the sequence of a first and/or second strand of: AD-35567.4 (SEQ ID NOs: 24 and 451), or a modified or unmodified variant thereof.

[3201] A RNAi agent comprising a first and a second strand, wherein the sequence of the first and/or second strand comprise a sequence of 15 contiguous nt from the sequence of a first and/or second strand of: AD-35526.4 (SEQ ID NOs: 25 and 452), or a modified or unmodified variant thereof.

[3202] A RNAi agent comprising a first and a second strand, wherein the sequence of the first and/or second strand comprise a sequence of 15 contiguous nt from the sequence of a first and/or second strand of: AD-35532.4 (SEQ ID NOs: 26 and 453), or a modified or unmodified variant thereof.

[3203] A RNAi agent comprising a first and a second strand, wherein the sequence of the first and/or second strand comprise a sequence of 15 contiguous nt from the sequence of a first and/or second strand of: AD-35538.4 (SEQ ID NOs: 27 and 454), or a modified or unmodified variant thereof.

[3204] A RNAi agent comprising a first and a second strand, wherein the sequence of the first and/or second strand comprise a sequence of 15 contiguous nt from the sequence of a first and/or second strand of: AD-35544.4 (SEQ ID NOs: 28 and 455), or a modified or unmodified variant thereof.

[3205] A RNAi agent comprising a first and a second strand, wherein the sequence of the first and/or second strand comprise a sequence of 15 contiguous nt from the sequence of a first and/or second strand of: AD-35550.4 (SEQ ID NOs: 29 and 456), or a modified or unmodified variant thereof.

[3206] A RNAi agent comprising a first and a second strand, wherein the sequence of the first and/or second strand comprise a sequence of 15 contiguous nt from the sequence of a first and/or second strand of: AD-35556.4 (SEQ ID NOs: 30 and 457), or a modified or unmodified variant thereof.

[3207] A RNAi agent comprising a first and a second strand, wherein the sequence of the first and/or second strand comprise a sequence of 15 contiguous nt from the sequence of a first and/or second strand of: AD-35562.4 (SEQ ID NOs: 31 and 458), or a modified or unmodified variant thereof.

[3208] A RNAi agent comprising a first and a second strand, wherein the sequence of the first and/or second strand comprise a sequence of 15 contiguous nt from the sequence of a first and/or second strand of: AD-35568.4 (SEQ ID NOs: 32 and 459), or a modified or unmodified variant thereof.

[3209] A RNAi agent comprising a first and a second strand, wherein the sequence of the first and/or second strand comprise a sequence of 15 contiguous nt from the sequence of a first and/or second strand of: AD-35527.4 (SEQ ID NOs: 33 and 460), or a modified or unmodified variant thereof.

[3210] A RNAi agent comprising a first and a second strand, wherein the sequence of the first and/or second strand comprise a sequence of 15 contiguous nt from the sequence of a first and/or second strand of: AD-35533.4 (SEQ ID NOs: 34 and 461), or a modified or unmodified variant thereof.

[3211] A RNAi agent comprising a first and a second strand, wherein the sequence of the first and/or second strand comprise a sequence of 15 contiguous nt from the sequence of a first and/or second strand of: AD-35539.4 (SEQ ID NOs: 35 and 462), or a modified or unmodified variant thereof.

[3212] A RNAi agent comprising a first and a second strand, wherein the sequence of the first and/or second strand comprise a sequence of 15 contiguous nt from the sequence of a first and/or second strand of: AD-35545.4 (SEQ ID NOs: 36 and 463), or a modified or unmodified variant thereof.

[3213] A RNAi agent comprising a first and a second strand, wherein the sequence of the first and/or second strand comprise a sequence of 15 contiguous nt from the sequence of a first and/or second strand of: AD-35551.4 (SEQ ID NOs: 37 and 464), or a modified or unmodified variant thereof.

[3214] A RNAi agent comprising a first and a second strand, wherein the sequence of the first and/or second strand comprise a sequence of 15 contiguous nt from the sequence of a first and/or second strand of: AD-35563.4 (SEQ ID NOs: 38 and 465), or a modified or unmodified variant

[3215] A RNAi agent comprising a first and a second strand, wherein the sequence of the first and/or second strand comprise a sequence of 15 contiguous nt from the sequence of a first and/or second strand of: AD-35528.4 (SEQ ID NOs: 39 and 466), or a modified or unmodified variant thereof.

[3216] A RNAi agent comprising a first and a second strand, wherein the sequence of the first and/or second strand comprise a sequence of 15 contiguous nt from the sequence of a first and/or second strand of: AD-35540.4 (SEQ ID NOs: 40 and 467), or a modified or unmodified variant thereof.

[3217] A RNAi agent comprising a first and a second strand, wherein the sequence of the first and/or second strand comprise a sequence of 15 contiguous nt from the sequence of a first and/or second strand of: AD-35546.4 (SEQ ID NOs: 41 and 468), or a modified or unmodified variant thereof.

[3218] A RNAi agent comprising a first and a second strand, wherein the sequence of the first and/or second strand comprise a sequence of 15 contiguous nt from the sequence of a first and/or second strand of: AD-35552.4 (SEQ ID NOs: 42 and 469), or a modified or unmodified variant thereof.

[3219] A RNAi agent comprising a first and a second strand, wherein the sequence of the first and/or second strand comprise a sequence of 15 contiguous nt from the sequence of a first and/or second strand of: AD-35558.4 (SEQ ID NOs: 43 and 470), or a modified or unmodified variant thereof.

[3220] A RNAi agent comprising a first and a second strand, wherein the sequence of the first and/or second strand comprise a sequence of 15 contiguous nt from the sequence of a first and/or second strand of: AD-35564.4 (SEQ ID NOs: 44 and 471), or a modified or unmodified variant thereof.

[3221] A RNAi agent comprising a first and a second strand, wherein the sequence of the first and/or second strand comprise a sequence of 15 contiguous nt from the sequence of a first and/or second strand of: AD-35570.4 (SEQ ID NOs: 45 and 472), or a modified or unmodified variant thereof.

[3222] A RNAi agent comprising a first and a second strand, wherein the sequence of the first and/or second strand comprise a sequence of 15 contiguous nt from the sequence of a first and/or second strand of: AD-35571.4 (SEQ ID NOs: 46 and 473), or a modified or unmodified variant thereof.

[3223] A RNAi agent comprising a first and a second strand, wherein the sequence of the first and/or second strand comprise a sequence of 15 contiguous nt from the sequence of a first and/or second strand of: AD-35577.4 (SEQ ID NOs: 47 and 474), or a modified or unmodified variant thereof.

[3224] A RNAi agent comprising a first and a second strand, wherein the sequence of the first and/or second strand comprise a sequence of 15 contiguous nt from the sequence of a first and/or second strand of: AD-35583.4 (SEQ ID NOs: 48 and 475), or a modified or unmodified variant thereof.

[3225] A RNAi agent comprising a first and a second strand, wherein the sequence of the first and/or second strand comprise a sequence of 15 contiguous nt from the sequence of a first and/or second strand of: AD-35589.4 (SEQ ID NOs: 49 and 476), or a modified or unmodified variant thereof.

[3226] A RNAi agent comprising a first and a second strand, wherein the sequence of the first and/or second strand comprise a sequence of 15 contiguous nt from the sequence of a first and/or second strand of: AD-35595.4 (SEQ ID NOs: 50 and 477), or a modified or unmodified variant thereof.

[3227] A RNAi agent comprising a first and a second strand, wherein the sequence of the first and/or second strand comprise a sequence of 15 contiguous nt from the sequence of a first and/or second strand of: AD-35601.4 (SEQ ID NOs: 51 and 478), or a modified or unmodified variant thereof.

[3228] A RNAi agent comprising a first and a second strand, wherein the sequence of the first and/or second strand comprise a sequence of 15 contiguous nt from the sequence of a first and/or second strand of: AD-35607.4 (SEQ ID NOs: 52 and 479), or a modified or unmodified variant thereof.

[3229] A RNAi agent comprising a first and a second strand, wherein the sequence of the first and/or second strand comprise a sequence of 15 contiguous nt from the sequence of a first and/or second strand of: AD-35613.4 (SEQ ID NOs: 53 and 480), or a modified or unmodified variant thereof.

[3230] A RNAi agent comprising a first and a second strand, wherein the sequence of the first and/or second strand comprise a sequence of 15 contiguous nt from the sequence of a first and/or second strand of: AD-35572.4 (SEQ ID NOs: 54 and 481), or a modified or unmodified variant thereof.

[3231] A RNAi agent comprising a first and a second strand, wherein the sequence of the first and/or second strand comprise a sequence of 15 contiguous nt from the sequence of a first and/or second strand of: AD-35578.4 (SEQ ID NOs: 55 and 482), or a modified or unmodified variant thereof.

[3232] A RNAi agent comprising a first and a second strand, wherein the sequence of the first and/or second strand comprise a sequence of 15 contiguous nt from the sequence of a first and/or second strand of: AD-35584.4 (SEQ ID NOs: 56 and 483), or a modified or unmodified variant thereof.

[3233] A RNAi agent comprising a first and a second strand, wherein the sequence of the first and/or second strand comprise a sequence of 15 contiguous nt from the sequence of a first and/or second strand of: AD-35590.4 (SEQ ID NOs: 57 and 484), or a modified or unmodified variant thereof.

[3234] A RNAi agent comprising a first and a second strand, wherein the sequence of the first and/or second strand comprise a sequence of 15 contiguous nt from the sequence of a first and/or second strand of: AD-35596.4 (SEQ ID NOs: 58 and 485), or a modified or unmodified variant thereof.

[3235] A RNAi agent comprising a first and a second strand, wherein the sequence of the first second strand of: AD-35602.4 (SEQ ID NOs: 59 and 486), or a modified or unmodified variant thereof.

[3236] A RNAi agent comprising a first and a second strand, wherein the sequence of the first and/or second strand comprise a sequence of 15 contiguous nt from the sequence of a first and/or second strand of: AD-35608.4 (SEQ ID NOs: 60 and 487), or a modified or unmodified variant thereof.

[3237] A RNAi agent comprising a first and a second strand, wherein the sequence of the first and/or second strand comprise a sequence of 15 contiguous nt from the sequence of a first and/or second strand of: AD-35614.4 (SEQ ID NOs: 61 and 488), or a modified or unmodified variant thereof.

[3238] A RNAi agent comprising a first and a second strand, wherein the sequence of the first and/or second strand comprise a sequence of 15 contiguous nt from the sequence of a first and/or second strand of: AD-35573.4 (SEQ ID NOs: 62 and 489), or a modified or unmodified variant thereof.

[3239] A RNAi agent comprising a first and a second strand, wherein the sequence of the first and/or second strand comprise a sequence of 15 contiguous nt from the sequence of a first and/or second strand of: AD-35579.4 (SEQ ID NOs: 63 and 490), or a modified or unmodified variant thereof.

[3240] A RNAi agent comprising a first and a second strand, wherein the sequence of the first and/or second strand comprise a sequence of 15 contiguous nt from the sequence of a first and/or second strand of: AD-35585.4 (SEQ ID NOs: 64 and 491), or a modified or unmodified variant thereof.

[3241] A RNAi agent comprising a first and a second strand, wherein the sequence of the first and/or second strand comprise a sequence of 15 contiguous nt from the sequence of a first and/or second strand of: AD-35591.4 (SEQ ID NOs: 65 and 492), or a modified or unmodified variant thereof.

[3242] A RNAi agent comprising a first and a second strand, wherein the sequence of the first and/or second strand comprise a sequence of 15 contiguous nt from the sequence of a first and/or second strand of: AD-35597.4 (SEQ ID NOs: 66 and 493), or a modified or unmodified variant thereof.

[3243] A RNAi agent comprising a first and a second strand, wherein the sequence of the first and/or second strand comprise a sequence of 15 contiguous nt from the sequence of a first and/or second strand of: AD-35603.4 (SEQ ID NOs: 67 and 494), or a modified or unmodified variant thereof.

[3244] A RNAi agent comprising a first and a second strand, wherein the sequence of the first and/or second strand comprise a sequence of 15 contiguous nt from the sequence of a first and/or second strand of: AD-35609.4 (SEQ ID NOs: 68 and 495), or a modified or unmodified variant thereof.

[3245] A RNAi agent comprising a first and a second strand, wherein the sequence of the first and/or second strand comprise a sequence of 15 contiguous nt from the sequence of a first and/or second strand of: AD-35615.4 (SEQ ID NOs: 69 and 496), or a modified or unmodified variant thereof.

[3246] A RNAi agent comprising a first and a second strand, wherein the sequence of the first and/or second strand comprise a sequence of 15 contiguous nt from the sequence of a first and/or second strand of: AD-35574.4 (SEQ ID NOs: 70 and 497), or a modified or unmodified variant thereof.

[3247] A RNAi agent comprising a first and a second strand, wherein the sequence of the first and/or second strand comprise a sequence of 15 contiguous nt from the sequence of a first and/or second strand of: AD-35580.1 (SEQ ID NOs: 71 and 498), or a modified or unmodified variant thereof.

[3248] A RNAi agent comprising a first and a second strand, wherein the sequence of the first and/or second strand comprise a sequence of 15 contiguous nt from the sequence of a first and/or second strand of: AD-35586.4 (SEQ ID NOs: 72 and 499), or a modified or unmodified variant thereof.

[3249] A RNAi agent comprising a first and a second strand, wherein the sequence of the first and/or second strand comprise a sequence of 15 contiguous nt from the sequence of a first and/or second strand of: AD-35592.4 (SEQ ID NOs: 73 and 500), or a modified or unmodified variant thereof.

[3250] A RNAi agent comprising a first and a second strand, wherein the sequence of the first and/or second strand comprise a sequence of 15 contiguous nt from the sequence of a first and/or second strand of: AD-35598.4 (SEQ ID NOs: 74 and 501), or a modified or unmodified variant thereof.

[3251] A RNAi agent comprising a first and a second strand, wherein the sequence of the first and/or second strand comprise a sequence of 15 contiguous nt from the sequence of a first and/or second strand of: AD-35604.4 (SEQ ID NOs: 75 and 502), or a modified or unmodified variant thereof.

[3252] A RNAi agent comprising a first and a second strand, wherein the sequence of the first and/or second strand comprise a sequence of 15 contiguous nt from the sequence of a first and/or second strand of: AD-35610.4 (SEQ ID NOs: 76 and 503), or a modified or unmodified variant thereof.

[3253] A RNAi agent comprising a first and a second strand, wherein the sequence of the first and/or second strand comprise a sequence of 15 contiguous nt from the sequence of a first and/or second strand of: AD-35616.4 (SEQ ID NOs: 77 and 504), or a modified or unmodified variant thereof.

[3254] A RNAi agent comprising a first and a second strand, wherein the sequence of the first and/or second strand comprise a sequence of 15 contiguous nt from the sequence of a first and/or second strand of: AD-35575.4 (SEQ ID NOs: 78 and 505), or a modified or unmodified variant thereof.

[3255] A RNAi agent comprising a first and a second strand, wherein the sequence of the first and/or second strand comprise a sequence of 15 contiguous nt from the sequence of a first and/or second strand of: AD-35581.4 (SEQ ID NOs: 79 and 506), or a modified or unmodified variant

[3256] A RNAi agent comprising a first and a second strand, wherein the sequence of the first and/or second strand comprise a sequence of 15 contiguous nt from the sequence of a first and/or second strand of: AD-35587.4 (SEQ ID NOs: 80 and 507), or a modified or unmodified variant thereof.

[3257] A RNAi agent comprising a first and a second strand, wherein the sequence of the first and/or second strand comprise a sequence of 15 contiguous nt from the sequence of a first and/or second strand of: AD-35593.4 (SEQ ID NOs: 81 and 508), or a modified or unmodified variant thereof.

[3258] A RNAi agent comprising a first and a second strand, wherein the sequence of the first and/or second strand comprise a sequence of 15 contiguous nt from the sequence of a first and/or second strand of: AD-35599.4 (SEQ ID NOs: 82 and 509), or a modified or unmodified variant thereof.

[3259] A RNAi agent comprising a first and a second strand, wherein the sequence of the first and/or second strand comprise a sequence of 15 contiguous nt from the sequence of a first and/or second strand of: AD-35605.4 (SEQ ID NOs: 83 and 510), or a modified or unmodified variant thereof.

[3260] A RNAi agent comprising a first and a second strand, wherein the sequence of the first and/or second strand comprise a sequence of 15 contiguous nt from the sequence of a first and/or second strand of: AD-35611.4 (SEQ ID NOs: 84 and 511), or a modified or unmodified variant thereof.

[3261] A RNAi agent comprising a first and a second strand, wherein the sequence of the first and/or second strand comprise a sequence of 15 contiguous nt from the sequence of a first and/or second strand of: AD-35617.4 (SEQ ID NOs: 85 and 512), or a modified or unmodified variant thereof.

[3262] A RNAi agent comprising a first and a second strand, wherein the sequence of the first and/or second strand comprise a sequence of 15 contiguous nt from the sequence of a first and/or second strand of: AD-35576.4 (SEQ ID NOs: 86 and 513), or a modified or unmodified variant thereof.

[3263] A RNAi agent comprising a first and a second strand, wherein the sequence of the first and/or second strand comprise a sequence of 15 contiguous nt from the sequence of a first and/or second strand of: AD-35588.4 (SEQ ID NOs: 87 and 514), or a modified or unmodified variant thereof.

[3264] A RNAi agent comprising a first and a second strand, wherein the sequence of the first and/or second strand comprise a sequence of 15 contiguous nt from the sequence of a first and/or second strand of: AD-35667.1 (SEQ ID NOs: 88 and 515), or a modified or unmodified variant thereof.

[3265] A RNAi agent comprising a first and a second strand, wherein the sequence of the first and/or second strand comprise a sequence of 15 contiguous nt from the sequence of a first and/or second strand of: AD-35673.1 (SEQ ID NOs: 89 and 516), or a modified or unmodified variant thereof.

[3266] A RNAi agent comprising a first and a second strand, wherein the sequence of the first and/or second strand comprise a sequence of 15 contiguous nt from the sequence of a first and/or second strand of: AD-35679.1 (SEQ ID NOs: 90 and 517), or a modified or unmodified variant thereof.

[3267] A RNAi agent comprising a first and a second strand, wherein the sequence of the first and/or second strand comprise a sequence of 15 contiguous nt from the sequence of a first and/or second strand of: AD-35685.1 (SEQ ID NOs: 91 and 518), or a modified or unmodified variant thereof.

[3268] A RNAi agent comprising a first and a second strand, wherein the sequence of the first and/or second strand comprise a sequence of 15 contiguous nt from the sequence of a first and/or second strand of: AD-35691.1 (SEQ ID NOs: 92 and 519), or a modified or unmodified variant thereof.

[3269] A RNAi agent comprising a first and a second strand, wherein the sequence of the first and/or second strand comprise a sequence of 15 contiguous nt from the sequence of a first and/or second strand of: AD-35557.1 (SEQ ID NOs: 93 and 520), or a modified or unmodified variant thereof.

[3270] A RNAi agent comprising a first and a second strand, wherein the sequence of the first and/or second strand comprise a sequence of 15 contiguous nt from the sequence of a first and/or second strand of: AD-35618.1 (SEQ ID NOs: 94 and 521), or a modified or unmodified variant thereof.

[3271] A RNAi agent comprising a first and a second strand, wherein the sequence of the first and/or second strand comprise a sequence of 15 contiguous nt from the sequence of a first and/or second strand of: AD-35569.1 (SEQ ID NOs: 95 and 522), or a modified or unmodified variant thereof.

[3272] A RNAi agent comprising a first and a second strand, wherein the sequence of the first and/or second strand comprise a sequence of 15 contiguous nt from the sequence of a first and/or second strand of: AD-35534.1 (SEQ ID NOs: 96 and 523), or a modified or unmodified variant thereof.

[3273] A RNAi agent comprising a first and a second strand, wherein the sequence of the first and/or second strand comprise a sequence of 15 contiguous nt from the sequence of a first and/or second strand of: AD-35582.1 (SEQ ID NOs: 97 and 524), or a modified or unmodified variant thereof.

[3274] A RNAi agent comprising a first and a second strand, wherein the sequence of the first and/or second strand comprise a sequence of 15 contiguous nt from the sequence of a first and/or second strand of: AD-35594.1 (SEQ ID NOs: 98 and 525), or a modified or unmodified variant thereof.

[3275] A RNAi agent comprising a first and a second strand, wherein the sequence of the first and/or second strand comprise a sequence of 15 contiguous nt from the sequence of a first and/or second strand of: AD-35600.1 (SEQ ID NOs: 99 and 526), or a modified or unmodified variant thereof.

[3276] A RNAi agent comprising a first and a second strand, wherein the sequence of the first second strand of: AD-35606.1 (SEQ ID NOs: 100 and 527), or a modified or unmodified variant thereof.

[3277] A RNAi agent comprising a first and a second strand, wherein the sequence of the first and/or second strand comprise a sequence of 15 contiguous nt from the sequence of a first and/or second strand of: AD-35612.1 (SEQ ID NOs: 101 and 528), or a modified or unmodified variant thereof.

[3278] A RNAi agent comprising a first and a second strand, wherein the sequence of the first and/or second strand comprise a sequence of 15 contiguous nt from the sequence of a first and/or second strand of: AD-38127.1 (SEQ ID NOs: 102 and 529), or a modified or unmodified variant thereof.

[3279] A RNAi agent comprising a first and a second strand, wherein the sequence of the first and/or second strand comprise a sequence of 15 contiguous nt from the sequence of a first and/or second strand of: AD-38133.1 (SEQ ID NOs: 103 and 530), or a modified or unmodified variant thereof.

[3280] A RNAi agent comprising a first and a second strand, wherein the sequence of the first and/or second strand comprise a sequence of 15 contiguous nt from the sequence of a first and/or second strand of: AD-38139.1 (SEQ ID NOs: 104 and 531), or a modified or unmodified variant thereof.

[3281] A RNAi agent comprising a first and a second strand, wherein the sequence of the first and/or second strand comprise a sequence of 15 contiguous nt from the sequence of a first and/or second strand of: AD-38145.1 (SEQ ID NOs: 105 and 532), or a modified or unmodified variant thereof.

[3282] A RNAi agent comprising a first and a second strand, wherein the sequence of the first and/or second strand comprise a sequence of 15 contiguous nt from the sequence of a first and/or second strand of: AD-38151.1 (SEQ ID NOs: 106 and 533), or a modified or unmodified variant thereof.

[3283] A RNAi agent comprising a first and a second strand, wherein the sequence of the first and/or second strand comprise a sequence of 15 contiguous nt from the sequence of a first and/or second strand of: AD-38157.1 (SEQ ID NOs: 107 and 534), or a modified or unmodified variant thereof.

[3284] A RNAi agent comprising a first and a second strand, wherein the sequence of the first and/or second strand comprise a sequence of 15 contiguous nt from the sequence of a first and/or second strand of: AD-38163.1 (SEQ ID NOs: 108 and 535), or a modified or unmodified variant thereof.

[3285] A RNAi agent comprising a first and a second strand, wherein the sequence of the first and/or second strand comprise a sequence of 15 contiguous nt from the sequence of a first and/or second strand of: AD-38169.1 (SEQ ID NOs: 109 and 536), or a modified or unmodified variant thereof.

[3286] A RNAi agent comprising a first and a second strand, wherein the sequence of the first and/or second strand comprise a sequence of 15 contiguous nt from the sequence of a first and/or second strand of: AD-38128.1 (SEQ ID NOs: 110 and 537), or a modified or unmodified variant thereof.

[3287] A RNAi agent comprising a first and a second strand, wherein the sequence of the first and/or second strand comprise a sequence of 15 contiguous nt from the sequence of a first and/or second strand of: AD-38134.1 (SEQ ID NOs: 111 and 538), or a modified or unmodified variant thereof.

[3288] A RNAi agent comprising a first and a second strand, wherein the sequence of the first and/or second strand comprise a sequence of 15 contiguous nt from the sequence of a first and/or second strand of: AD-38140.1 (SEQ ID NOs: 112 and 539), or a modified or unmodified variant thereof.

[3289] A RNAi agent comprising a first and a second strand, wherein the sequence of the first and/or second strand comprise a sequence of 15 contiguous nt from the sequence of a first and/or second strand of: AD-38146.1 (SEQ ID NOs: 113 and 540), or a modified or unmodified variant thereof.

[3290] A RNAi agent comprising a first and a second strand, wherein the sequence of the first and/or second strand comprise a sequence of 15 contiguous nt from the sequence of a first and/or second strand of: AD-38152.1 (SEQ ID NOs: 114 and 541), or a modified or unmodified variant thereof.

[3291] A RNAi agent comprising a first and a second strand, wherein the sequence of the first and/or second strand comprise a sequence of 15 contiguous nt from the sequence of a first and/or second strand of: AD-38158.1 (SEQ ID NOs: 115 and 542), or a modified or unmodified variant thereof.

[3292] A RNAi agent comprising a first and a second strand, wherein the sequence of the first and/or second strand comprise a sequence of 15 contiguous nt from the sequence of a first and/or second strand of: AD-38164.1 (SEQ ID NOs: 116 and 543), or a modified or unmodified variant thereof.

[3293] A RNAi agent comprising a first and a second strand, wherein the sequence of the first and/or second strand comprise a sequence of 15 contiguous nt from the sequence of a first and/or second strand of: AD-38170.1 (SEQ ID NOs: 117 and 544), or a modified or unmodified variant thereof.

[3294] A RNAi agent comprising a first and a second strand, wherein the sequence of the first and/or second strand comprise a sequence of 15 contiguous nt from the sequence of a first and/or second strand of: AD-38129.1 (SEQ ID NOs: 118 and 545), or a modified or unmodified variant thereof.

[3295] A RNAi agent comprising a first and a second strand, wherein the sequence of the first and/or second strand comprise a sequence of 15 contiguous nt from the sequence of a first and/or second strand of: AD-38135.1 (SEQ ID NOs: 119 and 546), or a modified or unmodified variant thereof.

[3296] A RNAi agent comprising a first and a second strand, wherein the sequence of the first and/or second strand comprise a sequence of 15 contiguous nt from the sequence of a first and/or second strand of: AD-38141.1 (SEQ ID NOs: 120 and 547), or a modified or unmodified variant

[3297] A RNAi agent comprising a first and a second strand, wherein the sequence of the first and/or second strand comprise a sequence of 15 contiguous nt from the sequence of a first and/or second strand of: AD-38147.1 (SEQ ID NOs: 121 and 548), or a modified or unmodified variant thereof.

[3298] A RNAi agent comprising a first and a second strand, wherein the sequence of the first and/or second strand comprise a sequence of 15 contiguous nt from the sequence of a first and/or second strand of: AD-38153.1 (SEQ ID NOs: 122 and 549), or a modified or unmodified variant thereof.

[3299] A RNAi agent comprising a first and a second strand, wherein the sequence of the first and/or second strand comprise a sequence of 15 contiguous nt from the sequence of a first and/or second strand of: AD-38159.1 (SEQ ID NOs: 123 and 550), or a modified or unmodified variant thereof.

[3300] A RNAi agent comprising a first and a second strand, wherein the sequence of the first and/or second strand comprise a sequence of 15 contiguous nt from the sequence of a first and/or second strand of: AD-38165.1 (SEQ ID NOs: 124 and 551), or a modified or unmodified variant thereof.

[3301] A RNAi agent comprising a first and a second strand, wherein the sequence of the first and/or second strand comprise a sequence of 15 contiguous nt from the sequence of a first and/or second strand of: AD-38171.1 (SEQ ID NOs: 125 and 552), or a modified or unmodified variant thereof.

[3302] A RNAi agent comprising a first and a second strand, wherein the sequence of the first and/or second strand comprise a sequence of 15 contiguous nt from the sequence of a first and/or second strand of: AD-38130.1 (SEQ ID NOs: 126 and 553), or a modified or unmodified variant thereof.

[3303] A RNAi agent comprising a first and a second strand, wherein the sequence of the first and/or second strand comprise a sequence of 15 contiguous nt from the sequence of a first and/or second strand of: AD-38136.1 (SEQ ID NOs: 127 and 554), or a modified or unmodified variant thereof.

[3304] A RNAi agent comprising a first and a second strand, wherein the sequence of the first and/or second strand comprise a sequence of 15 contiguous nt from the sequence of a first and/or second strand of: AD-38142.1 (SEQ ID NOs: 128 and 555), or a modified or unmodified variant thereof.

[3305] A RNAi agent comprising a first and a second strand, wherein the sequence of the first and/or second strand comprise a sequence of 15 contiguous nt from the sequence of a first and/or second strand of: AD-38148.1 (SEQ ID NOs: 129 and 556), or a modified or unmodified variant thereof.

[3306] A RNAi agent comprising a first and a second strand, wherein the sequence of the first and/or second strand comprise a sequence of 15 contiguous nt from the sequence of a first and/or second strand of: AD-38154.1 (SEQ ID NOs: 130 and 557), or a modified or unmodified variant thereof.

[3307] A RNAi agent comprising a first and a second strand, wherein the sequence of the first and/or second strand comprise a sequence of 15 contiguous nt from the sequence of a first and/or second strand of: AD-38160.1 (SEQ ID NOs: 131 and 558), or a modified or unmodified variant thereof.

[3308] A RNAi agent comprising a first and a second strand, wherein the sequence of the first and/or second strand comprise a sequence of 15 contiguous nt from the sequence of a first and/or second strand of: AD-38166.1 (SEQ ID NOs: 132 and 559), or a modified or unmodified variant thereof.

[3309] A RNAi agent comprising a first and a second strand, wherein the sequence of the first and/or second strand comprise a sequence of 15 contiguous nt from the sequence of a first and/or second strand of: AD-38172.1 (SEQ ID NOs: 133 and 560), or a modified or unmodified variant thereof.

[3310] A RNAi agent comprising a first and a second strand, wherein the sequence of the first and/or second strand comprise a sequence of 15 contiguous nt from the sequence of a first and/or second strand of: AD-38131.1 (SEQ ID NOs: 134 and 561), or a modified or unmodified variant thereof.

[3311] A RNAi agent comprising a first and a second strand, wherein the sequence of the first and/or second strand comprise a sequence of 15 contiguous nt from the sequence of a first and/or second strand of: AD-38137.1 (SEQ ID NOs: 135 and 562), or a modified or unmodified variant thereof.

[3312] A RNAi agent comprising a first and a second strand, wherein the sequence of the first and/or second strand comprise a sequence of 15 contiguous nt from the sequence of a first and/or second strand of: AD-38143.1 (SEQ ID NOs: 136 and 563), or a modified or unmodified variant thereof.

[3313] A RNAi agent comprising a first and a second strand, wherein the sequence of the first and/or second strand comprise a sequence of 15 contiguous nt from the sequence of a first and/or second strand of: AD-38149.1 (SEQ ID NOs: 137 and 564), or a modified or unmodified variant thereof.

[3314] A RNAi agent comprising a first and a second strand, wherein the sequence of the first and/or second strand comprise a sequence of 15 contiguous nt from the sequence of a first and/or second strand of: AD-38155.1 (SEQ ID NOs: 138 and 565), or a modified or unmodified variant thereof.

[3315] A RNAi agent comprising a first and a second strand, wherein the sequence of the first and/or second strand comprise a sequence of 15 contiguous nt from the sequence of a first and/or second strand of: AD-38161.1 (SEQ ID NOs: 139 and 566), or a modified or unmodified variant thereof.

[3316] A RNAi agent comprising a first and a second strand, wherein the sequence of the first and/or second strand comprise a sequence of 15 contiguous nt from the sequence of a first and/or second strand of: AD-38167.1 (SEQ ID NOs: 140 and 567), or a modified or unmodified variant thereof.

[3317] A RNAi agent comprising a first and a second strand, wherein the sequence of the first second strand of: AD-38173.1 (SEQ ID NOs: 141 and 568), or a modified or unmodified variant thereof.

[3318] A RNAi agent comprising a first and a second strand, wherein the sequence of the first and/or second strand comprise a sequence of 15 contiguous nt from the sequence of a first and/or second strand of: AD-38132.1 (SEQ ID NOs: 142 and 569), or a modified or unmodified variant thereof.

[3319] A RNAi agent comprising a first and a second strand, wherein the sequence of the first and/or second strand comprise a sequence of 15 contiguous nt from the sequence of a first and/or second strand of: AD-38138.1 (SEQ ID NOs: 143 and 570), or a modified or unmodified variant thereof.

[3320] A RNAi agent comprising a first and a second strand, wherein the sequence of the first and/or second strand comprise a sequence of 15 contiguous nt from the sequence of a first and/or second strand of: AD-38144.1 (SEQ ID NOs: 144 and 571), or a modified or unmodified variant thereof.

[3321] A RNAi agent comprising a first and a second strand, wherein the sequence of the first and/or second strand comprise a sequence of 15 contiguous nt from the sequence of a first and/or second strand of: AD-38150.1 (SEQ ID NOs: 145 and 572), or a modified or unmodified variant thereof.

[3322] A RNAi agent comprising a first and a second strand, wherein the sequence of the first and/or second strand comprise a sequence of 15 contiguous nt from the sequence of a first and/or second strand of: AD-38156.1 (SEQ ID NOs: 146 and 573), or a modified or unmodified variant thereof.

[3323] A RNAi agent comprising a first and a second strand, wherein the sequence of the first and/or second strand comprise a sequence of 15 contiguous nt from the sequence of a first and/or second strand of: AD-38162.1 (SEQ ID NOs: 147 and 574), or a modified or unmodified variant thereof.

[3324] A RNAi agent comprising a first and a second strand, wherein the sequence of the first and/or second strand comprise a sequence of 15 contiguous nt from the sequence of a first and/or second strand of: AD-38168.1 (SEQ ID NOs: 148 and 575), or a modified or unmodified variant thereof.

[3325] A RNAi agent comprising a first and a second strand, wherein the sequence of the first and/or second strand comprise a sequence of 15 contiguous nt from the sequence of a first and/or second strand of: AD-38174.1 (SEQ ID NOs: 149 and 576), or a modified or unmodified variant thereof.

[3326] A RNAi agent comprising a first and a second strand, wherein the sequence of the first and/or second strand comprise a sequence of 15 contiguous nt from the sequence of a first and/or second strand of: AD-39683.1 (SEQ ID NOs: 150 and 577), or a modified or unmodified variant thereof.

[3327] A RNAi agent comprising a first and a second strand, wherein the sequence of the first and/or second strand comprise a sequence of 15 contiguous nt from the sequence of a first and/or second strand of: AD-39689.1 (SEQ ID NOs: 151 and 578), or a modified or unmodified variant thereof.

[3328] A RNAi agent comprising a first and a second strand, wherein the sequence of the first and/or second strand comprise a sequence of 15 contiguous nt from the sequence of a first and/or second strand of: AD-39695.1 (SEQ ID NOs: 152 and 579), or a modified or unmodified variant thereof.

[3329] A RNAi agent comprising a first and a second strand, wherein the sequence of the first and/or second strand comprise a sequence of 15 contiguous nt from the sequence of a first and/or second strand of: AD-39701.1 (SEQ ID NOs: 153 and 580), or a modified or unmodified variant thereof.

[3330] A RNAi agent comprising a first and a second strand, wherein the sequence of the first and/or second strand comprise a sequence of 15 contiguous nt from the sequence of a first and/or second strand of: AD-39707.1 (SEQ ID NOs: 154 and 581), or a modified or unmodified variant thereof.

[3331] A RNAi agent comprising a first and a second strand, wherein the sequence of the first and/or second strand comprise a sequence of 15 contiguous nt from the sequence of a first and/or second strand of: AD-39713.1 (SEQ ID NOs: 155 and 582), or a modified or unmodified variant thereof.

[3332] A RNAi agent comprising a first and a second strand, wherein the sequence of the first and/or second strand comprise a sequence of 15 contiguous nt from the sequence of a first and/or second strand of: AD-39719.1 (SEQ ID NOs: 156 and 583), or a modified or unmodified variant thereof.

[3333] A RNAi agent comprising a first and a second strand, wherein the sequence of the first and/or second strand comprise a sequence of 15 contiguous nt from the sequence of a first and/or second strand of: AD-39725.1 (SEQ ID NOs: 157 and 584), or a modified or unmodified variant thereof.

[3334] A RNAi agent comprising a first and a second strand, wherein the sequence of the first and/or second strand comprise a sequence of 15 contiguous nt from the sequence of a first and/or second strand of: AD-39684.1 (SEQ ID NOs: 158 and 585), or a modified or unmodified variant thereof.

[3335] A RNAi agent comprising a first and a second strand, wherein the sequence of the first and/or second strand comprise a sequence of 15 contiguous nt from the sequence of a first and/or second strand of: AD-39690.1 (SEQ ID NOs: 159 and 586), or a modified or unmodified variant thereof.

[3336] A RNAi agent comprising a first and a second strand, wherein the sequence of the first and/or second strand comprise a sequence of 15 contiguous nt from the sequence of a first and/or second strand of: AD-39696.1 (SEQ ID NOs: 160 and 587), or a modified or unmodified variant thereof.

[3337] A RNAi agent comprising a first and a second strand, wherein the sequence of the first and/or second strand comprise a sequence of 15 contiguous nt from the sequence of a first and/or second strand of: AD-39702.1 (SEQ ID NOs: 161 and 588), or a modified or unmodified variant

[3338] A RNAi agent comprising a first and a second strand, wherein the sequence of the first and/or second strand comprise a sequence of 15 contiguous nt from the sequence of a first and/or second strand of: AD-39708.1 (SEQ ID NOs: 162 and 589), or a modified or unmodified variant thereof.

[3339] A RNAi agent comprising a first and a second strand, wherein the sequence of the first and/or second strand comprise a sequence of 15 contiguous nt from the sequence of a first and/or second strand of: AD-39714.1 (SEQ ID NOs: 163 and 590), or a modified or unmodified variant thereof.

[3340] A RNAi agent comprising a first and a second strand, wherein the sequence of the first and/or second strand comprise a sequence of 15 contiguous nt from the sequence of a first and/or second strand of: AD-39720.1 (SEQ ID NOs: 164 and 591), or a modified or unmodified variant thereof.

[3341] A RNAi agent comprising a first and a second strand, wherein the sequence of the first and/or second strand comprise a sequence of 15 contiguous nt from the sequence of a first and/or second strand of: AD-39726.1 (SEQ ID NOs: 165 and 592), or a modified or unmodified variant thereof.

[3342] A RNAi agent comprising a first and a second strand, wherein the sequence of the first and/or second strand comprise a sequence of 15 contiguous nt from the sequence of a first and/or second strand of: AD-39685.1 (SEQ ID NOs: 166 and 593), or a modified or unmodified variant thereof.

[3343] A RNAi agent comprising a first and a second strand, wherein the sequence of the first and/or second strand comprise a sequence of 15 contiguous nt from the sequence of a first and/or second strand of: AD-39691.1 (SEQ ID NOs: 167 and 594), or a modified or unmodified variant thereof.

[3344] A RNAi agent comprising a first and a second strand, wherein the sequence of the first and/or second strand comprise a sequence of 15 contiguous nt from the sequence of a first and/or second strand of: AD-39697.1 (SEQ ID NOs: 168 and 595), or a modified or unmodified variant thereof.

[3345] A RNAi agent comprising a first and a second strand, wherein the sequence of the first and/or second strand comprise a sequence of 15 contiguous nt from the sequence of a first and/or second strand of: AD-39703.1 (SEQ ID NOs: 169 and 596), or a modified or unmodified variant thereof.

[3346] A RNAi agent comprising a first and a second strand, wherein the sequence of the first and/or second strand comprise a sequence of 15 contiguous nt from the sequence of a first and/or second strand of: AD-39709.1 (SEQ ID NOs: 170 and 597), or a modified or unmodified variant thereof.

[3347] A RNAi agent comprising a first and a second strand, wherein the sequence of the first and/or second strand comprise a sequence of 15 contiguous nt from the sequence of a first and/or second strand of: AD-39715.1 (SEQ ID NOs: 171 and 598), or a modified or unmodified variant thereof.

[3348] A RNAi agent comprising a first and a second strand, wherein the sequence of the first and/or second strand comprise a sequence of 15 contiguous nt from the sequence of a first and/or second strand of: AD-39721.1 (SEQ ID NOs: 172 and 599), or a modified or unmodified variant thereof.

[3349] A RNAi agent comprising a first and a second strand, wherein the sequence of the first and/or second strand comprise a sequence of 15 contiguous nt from the sequence of a first and/or second strand of: AD-39727.1 (SEQ ID NOs: 173 and 600), or a modified or unmodified variant thereof.

[3350] A RNAi agent comprising a first and a second strand, wherein the sequence of the first and/or second strand comprise a sequence of 15 contiguous nt from the sequence of a first and/or second strand of: AD-39686.1 (SEQ ID NOs: 174 and 601), or a modified or unmodified variant thereof.

[3351] A RNAi agent comprising a first and a second strand, wherein the sequence of the first and/or second strand comprise a sequence of 15 contiguous nt from the sequence of a first and/or second strand of: AD-39692.1 (SEQ ID NOs: 175 and 602), or a modified or unmodified variant thereof.

[3352] A RNAi agent comprising a first and a second strand, wherein the sequence of the first and/or second strand comprise a sequence of 15 contiguous nt from the sequence of a first and/or second strand of: AD-39698.1 (SEQ ID NOs: 176 and 603), or a modified or unmodified variant thereof.

[3353] A RNAi agent comprising a first and a second strand, wherein the sequence of the first and/or second strand comprise a sequence of 15 contiguous nt from the sequence of a first and/or second strand of: AD-39704.1 (SEQ ID NOs: 177 and 604), or a modified or unmodified variant thereof.

[3354] A RNAi agent comprising a first and a second strand, wherein the sequence of the first and/or second strand comprise a sequence of 15 contiguous nt from the sequence of a first and/or second strand of: AD-39710.1 (SEQ ID NOs: 178 and 605), or a modified or unmodified variant thereof.

[3355] A RNAi agent comprising a first and a second strand, wherein the sequence of the first and/or second strand comprise a sequence of 15 contiguous nt from the sequence of a first and/or second strand of: AD-39716.1 (SEQ ID NOs: 179 and 606), or a modified or unmodified variant thereof.

[3356] A RNAi agent comprising a first and a second strand, wherein the sequence of the first and/or second strand comprise a sequence of 15 contiguous nt from the sequence of a first and/or second strand of: AD-39722.1 (SEQ ID NOs: 180 and 607), or a modified or unmodified variant thereof.

[3357] A RNAi agent comprising a first and a second strand, wherein the sequence of the first and/or second strand comprise a sequence of 15 contiguous nt from the sequence of a first and/or second strand of: AD-39728.1 (SEQ ID NOs: 181 and 608), or a modified or unmodified variant thereof.

[3358] A RNAi agent comprising a first and a second strand, wherein the sequence of the first second strand of: AD-39687.1 (SEQ ID NOs: 182 and 609), or a modified or unmodified variant thereof.

[3359] A RNAi agent comprising a first and a second strand, wherein the sequence of the first and/or second strand comprise a sequence of 15 contiguous nt from the sequence of a first and/or second strand of: AD-39693.1 (SEQ ID NOs: 183 and 610), or a modified or unmodified variant thereof.

[3360] A RNAi agent comprising a first and a second strand, wherein the sequence of the first and/or second strand comprise a sequence of 15 contiguous nt from the sequence of a first and/or second strand of: AD-39699.1 (SEQ ID NOs: 184 and 611), or a modified or unmodified variant thereof.

[3361] A RNAi agent comprising a first and a second strand, wherein the sequence of the first and/or second strand comprise a sequence of 15 contiguous nt from the sequence of a first and/or second strand of: AD-39705.1 (SEQ ID NOs: 185 and 612), or a modified or unmodified variant thereof.

[3362] A RNAi agent comprising a first and a second strand, wherein the sequence of the first and/or second strand comprise a sequence of 15 contiguous nt from the sequence of a first and/or second strand of: AD-39711.1 (SEQ ID NOs: 186 and 613), or a modified or unmodified variant thereof.

[3363] A RNAi agent comprising a first and a second strand, wherein the sequence of the first and/or second strand comprise a sequence of 15 contiguous nt from the sequence of a first and/or second strand of: AD-39717.1 (SEQ ID NOs: 187 and 614), or a modified or unmodified variant thereof.

[3364] A RNAi agent comprising a first and a second strand, wherein the sequence of the first and/or second strand comprise a sequence of 15 contiguous nt from the sequence of a first and/or second strand of: AD-39723.1 (SEQ ID NOs: 188 and 615), or a modified or unmodified variant thereof.

[3365] A RNAi agent comprising a first and a second strand, wherein the sequence of the first and/or second strand comprise a sequence of 15 contiguous nt from the sequence of a first and/or second strand of: AD-39729.1 (SEQ ID NOs: 189 and 616), or a modified or unmodified variant thereof.

[3366] A RNAi agent comprising a first and a second strand, wherein the sequence of the first and/or second strand comprise a sequence of 15 contiguous nt from the sequence of a first and/or second strand of: AD-39688.1 (SEQ ID NOs: 190 and 617), or a modified or unmodified variant thereof.

[3367] A RNAi agent comprising a first and a second strand, wherein the sequence of the first and/or second strand comprise a sequence of 15 contiguous nt from the sequence of a first and/or second strand of: AD-39694.1 (SEQ ID NOs: 191 and 618), or a modified or unmodified variant thereof.

[3368] A RNAi agent comprising a first and a second strand, wherein the sequence of the first and/or second strand comprise a sequence of 15 contiguous nt from the sequence of a first and/or second strand of: AD-39700.1 (SEQ ID NOs: 192 and 619), or a modified or unmodified variant thereof.

[3369] A RNAi agent comprising a first and a second strand, wherein the sequence of the first and/or second strand comprise a sequence of 15 contiguous nt from the sequence of a first and/or second strand of: AD-39706.1 (SEQ ID NOs: 193 and 620), or a modified or unmodified variant thereof.

[3370] A RNAi agent comprising a first and a second strand, wherein the sequence of the first and/or second strand comprise a sequence of 15 contiguous nt from the sequence of a first and/or second strand of: AD-39712.1 (SEQ ID NOs: 194 and 621), or a modified or unmodified variant thereof.

[3371] A RNAi agent comprising a first and a second strand, wherein the sequence of the first and/or second strand comprise a sequence of 15 contiguous nt from the sequence of a first and/or second strand of: AD-39718.1 (SEQ ID NOs: 195 and 622), or a modified or unmodified variant thereof.

[3372] A RNAi agent comprising a first and a second strand, wherein the sequence of the first and/or second strand comprise a sequence of 15 contiguous nt from the sequence of a first and/or second strand of: AD-39724.1 (SEQ ID NOs: 196 and 623), or a modified or unmodified variant thereof.

[3373] A RNAi agent comprising a first and a second strand, wherein the sequence of the first and/or second strand comprise a sequence of 15 contiguous nt from the sequence of a first and/or second strand of: AD-39730.1 (SEQ ID NOs: 197 and 624), or a modified or unmodified variant thereof.

[3374] A RNAi agent comprising a first and a second strand, wherein the sequence of the first and/or second strand comprise a sequence of 15 contiguous nt from the sequence of a first and/or second strand of: AD-39736.1 (SEQ ID NOs: 198 and 625), or a modified or unmodified variant thereof.

[3375] A RNAi agent comprising a first and a second strand, wherein the sequence of the first and/or second strand comprise a sequence of 15 contiguous nt from the sequence of a first and/or second strand of: AD-39742.1 (SEQ ID NOs: 199 and 626), or a modified or unmodified variant thereof.

[3376] A RNAi agent comprising a first and a second strand, wherein the sequence of the first and/or second strand comprise a sequence of 15 contiguous nt from the sequence of a first and/or second strand of: AD-39748.1 (SEQ ID NOs: 200 and 627), or a modified or unmodified variant thereof.

[3377] A RNAi agent comprising a first and a second strand, wherein the sequence of the first and/or second strand comprise a sequence of 15 contiguous nt from the sequence of a first and/or second strand of: AD-39754.1 (SEQ ID NOs: 201 and 628), or a modified or unmodified variant thereof.

[3378] A RNAi agent comprising a first and a second strand, wherein the sequence of the first and/or second strand comprise a sequence of 15 contiguous nt from the sequence of a first and/or second strand of: AD-39760.1 (SEQ ID NOs: 202 and 629), or a modified or unmodified variant

[3379] A RNAi agent comprising a first and a second strand, wherein the sequence of the first and/or second strand comprise a sequence of 15 contiguous nt from the sequence of a first and/or second strand of: AD-39766.1 (SEQ ID NOs: 203 and 630), or a modified or unmodified variant thereof.

[3380] A RNAi agent comprising a first and a second strand, wherein the sequence of the first and/or second strand comprise a sequence of 15 contiguous nt from the sequence of a first and/or second strand of: AD-39772.1 (SEQ ID NOs: 204 and 631), or a modified or unmodified variant thereof.

[3381] A RNAi agent comprising a first and a second strand, wherein the sequence of the first and/or second strand comprise a sequence of 15 contiguous nt from the sequence of a first and/or second strand of: AD-39731.1 (SEQ ID NOs: 205 and 632), or a modified or unmodified variant thereof.

[3382] A RNAi agent comprising a first and a second strand, wherein the sequence of the first and/or second strand comprise a sequence of 15 contiguous nt from the sequence of a first and/or second strand of: AD-39737.1 (SEQ ID NOs: 206 and 633), or a modified or unmodified variant thereof.

[3383] A RNAi agent comprising a first and a second strand, wherein the sequence of the first and/or second strand comprise a sequence of 15 contiguous nt from the sequence of a first and/or second strand of: AD-39743.1 (SEQ ID NOs: 207 and 634), or a modified or unmodified variant thereof.

[3384] A RNAi agent comprising a first and a second strand, wherein the sequence of the first and/or second strand comprise a sequence of 15 contiguous nt from the sequence of a first and/or second strand of: AD-39749.1 (SEQ ID NOs: 208 and 635), or a modified or unmodified variant thereof.

[3385] A RNAi agent comprising a first and a second strand, wherein the sequence of the first and/or second strand comprise a sequence of 15 contiguous nt from the sequence of a first and/or second strand of: AD-39755.1 (SEQ ID NOs: 209 and 636), or a modified or unmodified variant thereof.

[3386] A RNAi agent comprising a first and a second strand, wherein the sequence of the first and/or second strand comprise a sequence of 15 contiguous nt from the sequence of a first and/or second strand of: AD-39761.1 (SEQ ID NOs: 210 and 637), or a modified or unmodified variant thereof.

[3387] A RNAi agent comprising a first and a second strand, wherein the sequence of the first and/or second strand comprise a sequence of 15 contiguous nt from the sequence of a first and/or second strand of: AD-39767.1 (SEQ ID NOs: 211 and 638), or a modified or unmodified variant thereof.

[3388] A RNAi agent comprising a first and a second strand, wherein the sequence of the first and/or second strand comprise a sequence of 15 contiguous nt from the sequence of a first and/or second strand of: AD-39773.1 (SEQ ID NOs: 212 and 639), or a modified or unmodified variant thereof.

[3389] A RNAi agent comprising a first and a second strand, wherein the sequence of the first and/or second strand comprise a sequence of 15 contiguous nt from the sequence of a first and/or second strand of: AD-39732.1 (SEQ ID NOs: 213 and 640), or a modified or unmodified variant thereof.

[3390] A RNAi agent comprising a first and a second strand, wherein the sequence of the first and/or second strand comprise a sequence of 15 contiguous nt from the sequence of a first and/or second strand of: AD-39738.1 (SEQ ID NOs: 214 and 641), or a modified or unmodified variant thereof.

[3391] A RNAi agent comprising a first and a second strand, wherein the sequence of the first and/or second strand comprise a sequence of 15 contiguous nt from the sequence of a first and/or second strand of: AD-39744.1 (SEQ ID NOs: 215 and 642), or a modified or unmodified variant thereof.

[3392] A RNAi agent comprising a first and a second strand, wherein the sequence of the first and/or second strand comprise a sequence of 15 contiguous nt from the sequence of a first and/or second strand of: AD-39750.1 (SEQ ID NOs: 216 and 643), or a modified or unmodified variant thereof.

[3393] A RNAi agent comprising a first and a second strand, wherein the sequence of the first and/or second strand comprise a sequence of 15 contiguous nt from the sequence of a first and/or second strand of: AD-39756.1 (SEQ ID NOs: 217 and 644), or a modified or unmodified variant thereof.

[3394] A RNAi agent comprising a first and a second strand, wherein the sequence of the first and/or second strand comprise a sequence of 15 contiguous nt from the sequence of a first and/or second strand of: AD-39762.1 (SEQ ID NOs: 218 and 645), or a modified or unmodified variant thereof.

[3395] A RNAi agent comprising a first and a second strand, wherein the sequence of the first and/or second strand comprise a sequence of 15 contiguous nt from the sequence of a first and/or second strand of: AD-39768.1 (SEQ ID NOs: 219 and 646), or a modified or unmodified variant thereof.

[3396] A RNAi agent comprising a first and a second strand, wherein the sequence of the first and/or second strand comprise a sequence of 15 contiguous nt from the sequence of a first and/or second strand of: AD-39774.1 (SEQ ID NOs: 220 and 647), or a modified or unmodified variant thereof.

[3397] A RNAi agent comprising a first and a second strand, wherein the sequence of the first and/or second strand comprise a sequence of 15 contiguous nt from the sequence of a first and/or second strand of: AD-39733.1 (SEQ ID NOs: 221 and 648), or a modified or unmodified variant thereof.

[3398] A RNAi agent comprising a first and a second strand, wherein the sequence of the first and/or second strand comprise a sequence of 15 contiguous nt from the sequence of a first and/or second strand of: AD-39739.1 (SEQ ID NOs: 222 and 649), or a modified or unmodified variant thereof.

[3399] A RNAi agent comprising a first and a second strand, wherein the sequence of the first second strand of: AD-39745.1 (SEQ ID NOs: 223 and 650), or a modified or unmodified variant thereof.

[3400] A RNAi agent comprising a first and a second strand, wherein the sequence of the first and/or second strand comprise a sequence of 15 contiguous nt from the sequence of a first and/or second strand of: AD-39751.1 (SEQ ID NOs: 224 and 651), or a modified or unmodified variant thereof.

[3401] A RNAi agent comprising a first and a second strand, wherein the sequence of the first and/or second strand comprise a sequence of 15 contiguous nt from the sequence of a first and/or second strand of: AD-39757.1 (SEQ ID NOs: 225 and 652), or a modified or unmodified variant thereof.

[3402] A RNAi agent comprising a first and a second strand, wherein the sequence of the first and/or second strand comprise a sequence of 15 contiguous nt from the sequence of a first and/or second strand of: AD-39763.1 (SEQ ID NOs: 226 and 653), or a modified or unmodified variant thereof.

[3403] A RNAi agent comprising a first and a second strand, wherein the sequence of the first and/or second strand comprise a sequence of 15 contiguous nt from the sequence of a first and/or second strand of: AD-39769.1 (SEQ ID NOs: 227 and 654), or a modified or unmodified variant thereof.

[3404] A RNAi agent comprising a first and a second strand, wherein the sequence of the first and/or second strand comprise a sequence of 15 contiguous nt from the sequence of a first and/or second strand of: AD-39775.1 (SEQ ID NOs: 228 and 655), or a modified or unmodified variant thereof.

[3405] A RNAi agent comprising a first and a second strand, wherein the sequence of the first and/or second strand comprise a sequence of 15 contiguous nt from the sequence of a first and/or second strand of: AD-39734.1 (SEQ ID NOs: 229 and 656), or a modified or unmodified variant thereof.

[3406] A RNAi agent comprising a first and a second strand, wherein the sequence of the first and/or second strand comprise a sequence of 15 contiguous nt from the sequence of a first and/or second strand of: AD-39740.1 (SEQ ID NOs: 230 and 657), or a modified or unmodified variant thereof.

[3407] A RNAi agent comprising a first and a second strand, wherein the sequence of the first and/or second strand comprise a sequence of 15 contiguous nt from the sequence of a first and/or second strand of: AD-39746.1 (SEQ ID NOs: 231 and 658), or a modified or unmodified variant thereof.

[3408] A RNAi agent comprising a first and a second strand, wherein the sequence of the first and/or second strand comprise a sequence of 15 contiguous nt from the sequence of a first and/or second strand of: AD-39752.1 (SEQ ID NOs: 232 and 659), or a modified or unmodified variant thereof.

[3409] A RNAi agent comprising a first and a second strand, wherein the sequence of the first and/or second strand comprise a sequence of 15 contiguous nt from the sequence of a first and/or second strand of: AD-39758.1 (SEQ ID NOs: 233 and 660), or a modified or unmodified variant thereof.

[3410] A RNAi agent comprising a first and a second strand, wherein the sequence of the first and/or second strand comprise a sequence of 15 contiguous nt from the sequence of a first and/or second strand of: AD-39764.1 (SEQ ID NOs: 234 and 661), or a modified or unmodified variant thereof.

[3411] A RNAi agent comprising a first and a second strand, wherein the sequence of the first and/or second strand comprise a sequence of 15 contiguous nt from the sequence of a first and/or second strand of: AD-39770.1 (SEQ ID NOs: 235 and 662), or a modified or unmodified variant thereof.

[3412] A RNAi agent comprising a first and a second strand, wherein the sequence of the first and/or second strand comprise a sequence of 15 contiguous nt from the sequence of a first and/or second strand of: AD-39776.1 (SEQ ID NOs: 236 and 663), or a modified or unmodified variant thereof.

[3413] A RNAi agent comprising a first and a second strand, wherein the sequence of the first and/or second strand comprise a sequence of 15 contiguous nt from the sequence of a first and/or second strand of: AD-39735.1 (SEQ ID NOs: 237 and 664), or a modified or unmodified variant thereof.

[3414] A RNAi agent comprising a first and a second strand, wherein the sequence of the first and/or second strand comprise a sequence of 15 contiguous nt from the sequence of a first and/or second strand of: AD-39741.1 (SEQ ID NOs: 238 and 665), or a modified or unmodified variant thereof.

[3415] A RNAi agent comprising a first and a second strand, wherein the sequence of the first and/or second strand comprise a sequence of 15 contiguous nt from the sequence of a first and/or second strand of: AD-39747.1 (SEQ ID NOs: 239 and 666), or a modified or unmodified variant thereof.

[3416] A RNAi agent comprising a first and a second strand, wherein the sequence of the first and/or second strand comprise a sequence of 15 contiguous nt from the sequence of a first and/or second strand of: AD-39753.1 (SEQ ID NOs: 240 and 667), or a modified or unmodified variant thereof.

[3417] A RNAi agent comprising a first and a second strand, wherein the sequence of the first and/or second strand comprise a sequence of 15 contiguous nt from the sequence of a first and/or second strand of: AD-39759.1 (SEQ ID NOs: 241 and 668), or a modified or unmodified variant thereof.

[3418] A RNAi agent comprising a first and a second strand, wherein the sequence of the first and/or second strand comprise a sequence of 15 contiguous nt from the sequence of a first and/or second strand of: AD-39765.1 (SEQ ID NOs: 242 and 669), or a modified or unmodified variant thereof.

[3419] A RNAi agent comprising a first and a second strand, wherein the sequence of the first and/or second strand comprise a sequence of 15 contiguous nt from the sequence of a first and/or second strand of: AD-39771.1 (SEQ ID NOs: 243 and 670), or a modified or unmodified variant

[3420] A RNAi agent comprising a first and a second strand, wherein the sequence of the first and/or second strand comprise a sequence of 15 contiguous nt from the sequence of a first and/or second strand of: AD-39778.1 (SEQ ID NOs: 244 and 671), or a modified or unmodified variant thereof.

[3421] A RNAi agent comprising a first and a second strand, wherein the sequence of the first and/or second strand comprise a sequence of 15 contiguous nt from the sequence of a first and/or second strand of: AD-39784.1 (SEQ ID NOs: 245 and 672), or a modified or unmodified variant thereof.

[3422] A RNAi agent comprising a first and a second strand, wherein the sequence of the first and/or second strand comprise a sequence of 15 contiguous nt from the sequence of a first and/or second strand of: AD-39790.1 (SEQ ID NOs: 246 and 673), or a modified or unmodified variant thereof.

[3423] A RNAi agent comprising a first and a second strand, wherein the sequence of the first and/or second strand comprise a sequence of 15 contiguous nt from the sequence of a first and/or second strand of: AD-39796.1 (SEQ ID NOs: 247 and 674), or a modified or unmodified variant thereof.

[3424] A RNAi agent comprising a first and a second strand, wherein the sequence of the first and/or second strand comprise a sequence of 15 contiguous nt from the sequence of a first and/or second strand of: AD-39802.1 (SEQ ID NOs: 248 and 675), or a modified or unmodified variant thereof.

[3425] A RNAi agent comprising a first and a second strand, wherein the sequence of the first and/or second strand comprise a sequence of 15 contiguous nt from the sequence of a first and/or second strand of: AD-39808.1 (SEQ ID NOs: 249 and 676), or a modified or unmodified variant thereof.

[3426] A RNAi agent comprising a first and a second strand, wherein the sequence of the first and/or second strand comprise a sequence of 15 contiguous nt from the sequence of a first and/or second strand of: AD-39814.1 (SEQ ID NOs: 250 and 677), or a modified or unmodified variant thereof.

[3427] A RNAi agent comprising a first and a second strand, wherein the sequence of the first and/or second strand comprise a sequence of 15 contiguous nt from the sequence of a first and/or second strand of: AD-39820.1 (SEQ ID NOs: 251 and 678), or a modified or unmodified variant thereof.

[3428] A RNAi agent comprising a first and a second strand, wherein the sequence of the first and/or second strand comprise a sequence of 15 contiguous nt from the sequence of a first and/or second strand of: AD-39779.1 (SEQ ID NOs: 252 and 679), or a modified or unmodified variant thereof.

[3429] A RNAi agent comprising a first and a second strand, wherein the sequence of the first and/or second strand comprise a sequence of 15 contiguous nt from the sequence of a first and/or second strand of: AD-39785.1 (SEQ ID NOs: 253 and 680), or a modified or unmodified variant thereof.

[3430] A RNAi agent comprising a first and a second strand, wherein the sequence of the first and/or second strand comprise a sequence of 15 contiguous nt from the sequence of a first and/or second strand of: AD-39791.1 (SEQ ID NOs: 254 and 681), or a modified or unmodified variant thereof.

[3431] A RNAi agent comprising a first and a second strand, wherein the sequence of the first and/or second strand comprise a sequence of 15 contiguous nt from the sequence of a first and/or second strand of: AD-39797.1 (SEQ ID NOs: 255 and 682), or a modified or unmodified variant thereof.

[3432] A RNAi agent comprising a first and a second strand, wherein the sequence of the first and/or second strand comprise a sequence of 15 contiguous nt from the sequence of a first and/or second strand of: AD-39803.1 (SEQ ID NOs: 256 and 683), or a modified or unmodified variant thereof.

[3433] A RNAi agent comprising a first and a second strand, wherein the sequence of the first and/or second strand comprise a sequence of 15 contiguous nt from the sequence of a first and/or second strand of: AD-39809.1 (SEQ ID NOs: 257 and 684), or a modified or unmodified variant thereof.

[3434] A RNAi agent comprising a first and a second strand, wherein the sequence of the first and/or second strand comprise a sequence of 15 contiguous nt from the sequence of a first and/or second strand of: AD-39815.1 (SEQ ID NOs: 258 and 685), or a modified or unmodified variant thereof.

[3435] A RNAi agent comprising a first and a second strand, wherein the sequence of the first and/or second strand comprise a sequence of 15 contiguous nt from the sequence of a first and/or second strand of: AD-39821.1 (SEQ ID NOs: 259 and 686), or a modified or unmodified variant thereof.

[3436] A RNAi agent comprising a first and a second strand, wherein the sequence of the first and/or second strand comprise a sequence of 15 contiguous nt from the sequence of a first and/or second strand of: AD-39780.1 (SEQ ID NOs: 260 and 687), or a modified or unmodified variant thereof.

[3437] A RNAi agent comprising a first and a second strand, wherein the sequence of the first and/or second strand comprise a sequence of 15 contiguous nt from the sequence of a first and/or second strand of: AD-39786.1 (SEQ ID NOs: 261 and 688), or a modified or unmodified variant thereof.

[3438] A RNAi agent comprising a first and a second strand, wherein the sequence of the first and/or second strand comprise a sequence of 15 contiguous nt from the sequence of a first and/or second strand of: AD-39792.1 (SEQ ID NOs: 262 and 689), or a modified or unmodified variant thereof.

[3439] A RNAi agent comprising a first and a second strand, wherein the sequence of the first and/or second strand comprise a sequence of 15 contiguous nt from the sequence of a first and/or second strand of: AD-39798.1 (SEQ ID NOs: 263 and 690), or a modified or unmodified variant thereof.

[3440] A RNAi agent comprising a first and a second strand, wherein the sequence of the first second strand of: AD-39804.1 (SEQ ID NOs: 264 and 691), or a modified or unmodified variant thereof.

[3441] A RNAi agent comprising a first and a second strand, wherein the sequence of the first and/or second strand comprise a sequence of 15 contiguous nt from the sequence of a first and/or second strand of: AD-39810.1 (SEQ ID NOs: 265 and 692), or a modified or unmodified variant thereof.

[3442] A RNAi agent comprising a first and a second strand, wherein the sequence of the first and/or second strand comprise a sequence of 15 contiguous nt from the sequence of a first and/or second strand of: AD-39816.1 (SEQ ID NOs: 266 and 693), or a modified or unmodified variant thereof.

[3443] A RNAi agent comprising a first and a second strand, wherein the sequence of the first and/or second strand comprise a sequence of 15 contiguous nt from the sequence of a first and/or second strand of: AD-39822.1 (SEQ ID NOs: 267 and 694), or a modified or unmodified variant thereof.

[3444] A RNAi agent comprising a first and a second strand, wherein the sequence of the first and/or second strand comprise a sequence of 15 contiguous nt from the sequence of a first and/or second strand of: AD-39781.1 (SEQ ID NOs: 268 and 695), or a modified or unmodified variant thereof.

[3445] A RNAi agent comprising a first and a second strand, wherein the sequence of the first and/or second strand comprise a sequence of 15 contiguous nt from the sequence of a first and/or second strand of: AD-39787.1 (SEQ ID NOs: 269 and 696), or a modified or unmodified variant thereof.

[3446] A RNAi agent comprising a first and a second strand, wherein the sequence of the first and/or second strand comprise a sequence of 15 contiguous nt from the sequence of a first and/or second strand of: AD-39793.1 (SEQ ID NOs: 270 and 697), or a modified or unmodified variant thereof.

[3447] A RNAi agent comprising a first and a second strand, wherein the sequence of the first and/or second strand comprise a sequence of 15 contiguous nt from the sequence of a first and/or second strand of: AD-39799.1 (SEQ ID NOs: 271 and 698), or a modified or unmodified variant thereof.

[3448] A RNAi agent comprising a first and a second strand, wherein the sequence of the first and/or second strand comprise a sequence of 15 contiguous nt from the sequence of a first and/or second strand of: AD-39805.1 (SEQ ID NOs: 272 and 699), or a modified or unmodified variant thereof.

[3449] A RNAi agent comprising a first and a second strand, wherein the sequence of the first and/or second strand comprise a sequence of 15 contiguous nt from the sequence of a first and/or second strand of: AD-39811.1 (SEQ ID NOs: 273 and 700), or a modified or unmodified variant thereof.

[3450] A RNAi agent comprising a first and a second strand, wherein the sequence of the first and/or second strand comprise a sequence of 15 contiguous nt from the sequence of a first and/or second strand of: AD-39817.1 (SEQ ID NOs: 274 and 701), or a modified or unmodified variant thereof.

[3451] A RNAi agent comprising a first and a second strand, wherein the sequence of the first and/or second strand comprise a sequence of 15 contiguous nt from the sequence of a first and/or second strand of: AD-39823.1 (SEQ ID NOs: 275 and 702), or a modified or unmodified variant thereof.

[3452] A RNAi agent comprising a first and a second strand, wherein the sequence of the first and/or second strand comprise a sequence of 15 contiguous nt from the sequence of a first and/or second strand of: AD-39782.1 (SEQ ID NOs: 276 and 703), or a modified or unmodified variant thereof.

[3453] A RNAi agent comprising a first and a second strand, wherein the sequence of the first and/or second strand comprise a sequence of 15 contiguous nt from the sequence of a first and/or second strand of: AD-39788.1 (SEQ ID NOs: 277 and 704), or a modified or unmodified variant thereof.

[3454] A RNAi agent comprising a first and a second strand, wherein the sequence of the first and/or second strand comprise a sequence of 15 contiguous nt from the sequence of a first and/or second strand of: AD-39794.1 (SEQ ID NOs: 278 and 705), or a modified or unmodified variant thereof.

[3455] A RNAi agent comprising a first and a second strand, wherein the sequence of the first and/or second strand comprise a sequence of 15 contiguous nt from the sequence of a first and/or second strand of: AD-39800.1 (SEQ ID NOs: 279 and 706), or a modified or unmodified variant thereof.

[3456] A RNAi agent comprising a first and a second strand, wherein the sequence of the first and/or second strand comprise a sequence of 15 contiguous nt from the sequence of a first and/or second strand of: AD-39806.1 (SEQ ID NOs: 280 and 707), or a modified or unmodified variant thereof.

[3457] A RNAi agent comprising a first and a second strand, wherein the sequence of the first and/or second strand comprise a sequence of 15 contiguous nt from the sequence of a first and/or second strand of: AD-39812.1 (SEQ ID NOs: 281 and 708), or a modified or unmodified variant thereof.

[3458] A RNAi agent comprising a first and a second strand, wherein the sequence of the first and/or second strand comprise a sequence of 15 contiguous nt from the sequence of a first and/or second strand of: AD-39818.1 (SEQ ID NOs: 282 and 709), or a modified or unmodified variant thereof.

[3459] A RNAi agent comprising a first and a second strand, wherein the sequence of the first and/or second strand comprise a sequence of 15 contiguous nt from the sequence of a first and/or second strand of: AD-39824.1 (SEQ ID NOs: 283 and 710), or a modified or unmodified variant thereof.

[3460] A RNAi agent comprising a first and a second strand, wherein the sequence of the first and/or second strand comprise a sequence of 15 contiguous nt from the sequence of a first and/or second strand of: AD-39783.1 (SEQ ID NOs: 284 and 711), or a modified or unmodified variant

[3461] A RNAi agent comprising a first and a second strand, wherein the sequence of the first and/or second strand comprise a sequence of 15 contiguous nt from the sequence of a first and/or second strand of: AD-39789.1 (SEQ ID NOs: 285 and 712), or a modified or unmodified variant thereof.

[3462] A RNAi agent comprising a first and a second strand, wherein the sequence of the first and/or second strand comprise a sequence of 15 contiguous nt from the sequence of a first and/or second strand of: AD-39795.1 (SEQ ID NOs: 286 and 713), or a modified or unmodified variant thereof.

[3463] A RNAi agent comprising a first and a second strand, wherein the sequence of the first and/or second strand comprise a sequence of 15 contiguous nt from the sequence of a first and/or second strand of: AD-39801.1 (SEQ ID NOs: 287 and 714), or a modified or unmodified variant thereof.

[3464] A RNAi agent comprising a first and a second strand, wherein the sequence of the first and/or second strand comprise a sequence of 15 contiguous nt from the sequence of a first and/or second strand of: AD-39807.1 (SEQ ID NOs: 288 and 715), or a modified or unmodified variant thereof.

[3465] A RNAi agent comprising a first and a second strand, wherein the sequence of the first and/or second strand comprise a sequence of 15 contiguous nt from the sequence of a first and/or second strand of: AD-39813.1 (SEQ ID NOs: 289 and 716), or a modified or unmodified variant thereof.

[3466] A RNAi agent comprising a first and a second strand, wherein the sequence of the first and/or second strand comprise a sequence of 15 contiguous nt from the sequence of a first and/or second strand of: AD-39819.1 (SEQ ID NOs: 290 and 717), or a modified or unmodified variant thereof.

[3467] A RNAi agent comprising a first and a second strand, wherein the sequence of the first and/or second strand comprise a sequence of 15 contiguous nt from the sequence of a first and/or second strand of: AD-39825.1 (SEQ ID NOs: 291 and 718), or a modified or unmodified variant thereof.

[3468] A RNAi agent comprising a first and a second strand, wherein the sequence of the first and/or second strand comprise a sequence of 15 contiguous nt from the sequence of a first and/or second strand of: AD-39831.1 (SEQ ID NOs: 292 and 719), or a modified or unmodified variant thereof.

[3469] A RNAi agent comprising a first and a second strand, wherein the sequence of the first and/or second strand comprise a sequence of 15 contiguous nt from the sequence of a first and/or second strand of: AD-39837.1 (SEQ ID NOs: 293 and 720), or a modified or unmodified variant thereof.

[3470] A RNAi agent comprising a first and a second strand, wherein the sequence of the first and/or second strand comprise a sequence of 15 contiguous nt from the sequence of a first and/or second strand of: AD-39843.1 (SEQ ID NOs: 294 and 721), or a modified or unmodified variant thereof.

[3471] A RNAi agent comprising a first and a second strand, wherein the sequence of the first and/or second strand comprise a sequence of 15 contiguous nt from the sequence of a first and/or second strand of: AD-39849.1 (SEQ ID NOs: 295 and 722), or a modified or unmodified variant thereof.

[3472] A RNAi agent comprising a first and a second strand, wherein the sequence of the first and/or second strand comprise a sequence of 15 contiguous nt from the sequence of a first and/or second strand of: AD-39855.1 (SEQ ID NOs: 296 and 723), or a modified or unmodified variant thereof.

[3473] A RNAi agent comprising a first and a second strand, wherein the sequence of the first and/or second strand comprise a sequence of 15 contiguous nt from the sequence of a first and/or second strand of: AD-39861.1 (SEQ ID NOs: 297 and 724), or a modified or unmodified variant thereof.

[3474] A RNAi agent comprising a first and a second strand, wherein the sequence of the first and/or second strand comprise a sequence of 15 contiguous nt from the sequence of a first and/or second strand of: AD-39867.1 (SEQ ID NOs: 298 and 725), or a modified or unmodified variant thereof.

[3475] A RNAi agent comprising a first and a second strand, wherein the sequence of the first and/or second strand comprise a sequence of 15 contiguous nt from the sequence of a first and/or second strand of: AD-39826.1 (SEQ ID NOs: 299 and 726), or a modified or unmodified variant thereof.

[3476] A RNAi agent comprising a first and a second strand, wherein the sequence of the first and/or second strand comprise a sequence of 15 contiguous nt from the sequence of a first and/or second strand of: AD-39832.1 (SEQ ID NOs: 300 and 727), or a modified or unmodified variant thereof.

[3477] A RNAi agent comprising a first and a second strand, wherein the sequence of the first and/or second strand comprise a sequence of 15 contiguous nt from the sequence of a first and/or second strand of: AD-39838.1 (SEQ ID NOs: 301 and 728), or a modified or unmodified variant thereof.

[3478] A RNAi agent comprising a first and a second strand, wherein the sequence of the first and/or second strand comprise a sequence of 15 contiguous nt from the sequence of a first and/or second strand of: AD-39844.1 (SEQ ID NOs: 302 and 729), or a modified or unmodified variant thereof.

[3479] A RNAi agent comprising a first and a second strand, wherein the sequence of the first and/or second strand comprise a sequence of 15 contiguous nt from the sequence of a first and/or second strand of: AD-39850.1 (SEQ ID NOs: 303 and 730), or a modified or unmodified variant thereof.

[3480] A RNAi agent comprising a first and a second strand, wherein the sequence of the first and/or second strand comprise a sequence of 15 contiguous nt from the sequence of a first and/or second strand of: AD-39856.1 (SEQ ID NOs: 304 and 731), or a modified or unmodified variant thereof.

[3481] A RNAi agent comprising a first and a second strand, wherein the sequence of the first second strand of: AD-39862.1 (SEQ ID NOs: 305 and 732), or a modified or unmodified variant thereof.

[3482] A RNAi agent comprising a first and a second strand, wherein the sequence of the first and/or second strand comprise a sequence of 15 contiguous nt from the sequence of a first and/or second strand of: AD-39868.1 (SEQ ID NOs: 306 and 733), or a modified or unmodified variant thereof.

[3483] A RNAi agent comprising a first and a second strand, wherein the sequence of the first and/or second strand comprise a sequence of 15 contiguous nt from the sequence of a first and/or second strand of: AD-39827.1 (SEQ ID NOs: 307 and 734), or a modified or unmodified variant thereof.

[3484] A RNAi agent comprising a first and a second strand, wherein the sequence of the first and/or second strand comprise a sequence of 15 contiguous nt from the sequence of a first and/or second strand of: AD-39833.1 (SEQ ID NOs: 308 and 735), or a modified or unmodified variant thereof.

[3485] A RNAi agent comprising a first and a second strand, wherein the sequence of the first and/or second strand comprise a sequence of 15 contiguous nt from the sequence of a first and/or second strand of: AD-39839.1 (SEQ ID NOs: 309 and 736), or a modified or unmodified variant thereof.

[3486] A RNAi agent comprising a first and a second strand, wherein the sequence of the first and/or second strand comprise a sequence of 15 contiguous nt from the sequence of a first and/or second strand of: AD-39845.1 (SEQ ID NOs: 310 and 737), or a modified or unmodified variant thereof.

[3487] A RNAi agent comprising a first and a second strand, wherein the sequence of the first and/or second strand comprise a sequence of 15 contiguous nt from the sequence of a first and/or second strand of: AD-39851.1 (SEQ ID NOs: 311 and 738), or a modified or unmodified variant thereof.

[3488] A RNAi agent comprising a first and a second strand, wherein the sequence of the first and/or second strand comprise a sequence of 15 contiguous nt from the sequence of a first and/or second strand of: AD-39857.1 (SEQ ID NOs: 312 and 739), or a modified or unmodified variant thereof.

[3489] A RNAi agent comprising a first and a second strand, wherein the sequence of the first and/or second strand comprise a sequence of 15 contiguous nt from the sequence of a first and/or second strand of: AD-39863.1 (SEQ ID NOs: 313 and 740), or a modified or unmodified variant thereof.

[3490] A RNAi agent comprising a first and a second strand, wherein the sequence of the first and/or second strand comprise a sequence of 15 contiguous nt from the sequence of a first and/or second strand of: AD-39869.1 (SEQ ID NOs: 314 and 741), or a modified or unmodified variant thereof.

[3491] A RNAi agent comprising a first and a second strand, wherein the sequence of the first and/or second strand comprise a sequence of 15 contiguous nt from the sequence of a first and/or second strand of: AD-39828.1 (SEQ ID NOs: 315 and 742), or a modified or unmodified variant thereof.

[3492] A RNAi agent comprising a first and a second strand, wherein the sequence of the first and/or second strand comprise a sequence of 15 contiguous nt from the sequence of a first and/or second strand of: AD-39834.1 (SEQ ID NOs: 316 and 743), or a modified or unmodified variant thereof.

[3493] A RNAi agent comprising a first and a second strand, wherein the sequence of the first and/or second strand comprise a sequence of 15 contiguous nt from the sequence of a first and/or second strand of: AD-39840.1 (SEQ ID NOs: 317 and 744), or a modified or unmodified variant thereof.

[3494] A RNAi agent comprising a first and a second strand, wherein the sequence of the first and/or second strand comprise a sequence of 15 contiguous nt from the sequence of a first and/or second strand of: AD-39846.1 (SEQ ID NOs: 318 and 745), or a modified or unmodified variant thereof.

[3495] A RNAi agent comprising a first and a second strand, wherein the sequence of the first and/or second strand comprise a sequence of 15 contiguous nt from the sequence of a first and/or second strand of: AD-39852.1 (SEQ ID NOs: 319 and 746), or a modified or unmodified variant thereof.

[3496] A RNAi agent comprising a first and a second strand, wherein the sequence of the first and/or second strand comprise a sequence of 15 contiguous nt from the sequence of a first and/or second strand of: AD-39858.1 (SEQ ID NOs: 320 and 747), or a modified or unmodified variant thereof.

[3497] A RNAi agent comprising a first and a second strand, wherein the sequence of the first and/or second strand comprise a sequence of 15 contiguous nt from the sequence of a first and/or second strand of: AD-39864.1 (SEQ ID NOs: 321 and 748), or a modified or unmodified variant thereof.

[3498] A RNAi agent comprising a first and a second strand, wherein the sequence of the first and/or second strand comprise a sequence of 15 contiguous nt from the sequence of a first and/or second strand of: AD-39870.1 (SEQ ID NOs: 322 and 749), or a modified or unmodified variant thereof.

[3499] A RNAi agent comprising a first and a second strand, wherein the sequence of the first and/or second strand comprise a sequence of 15 contiguous nt from the sequence of a first and/or second strand of: AD-39829.1 (SEQ ID NOs: 323 and 750), or a modified or unmodified variant thereof.

[3500] A RNAi agent comprising a first and a second strand, wherein the sequence of the first and/or second strand comprise a sequence of 15 contiguous nt from the sequence of a first and/or second strand of: AD-39835.1 (SEQ ID NOs: 324 and 751), or a modified or unmodified variant thereof.

[3501] A RNAi agent comprising a first and a second strand, wherein the sequence of the first and/or second strand comprise a sequence of 15 contiguous nt from the sequence of a first and/or second strand of: AD-39841.1 (SEQ ID NOs: 325 and 752), or a modified or unmodified variant

[3502] A RNAi agent comprising a first and a second strand, wherein the sequence of the first and/or second strand comprise a sequence of 15 contiguous nt from the sequence of a first and/or second strand of: AD-39853.1 (SEQ ID NOs: 326 and 753), or a modified or unmodified variant thereof.

[3503] A RNAi agent comprising a first and a second strand, wherein the sequence of the first and/or second strand comprise a sequence of 15 contiguous nt from the sequence of a first and/or second strand of: AD-39859.1 (SEQ ID NOs: 327 and 754), or a modified or unmodified variant thereof.

[3504] A RNAi agent comprising a first and a second strand, wherein the sequence of the first and/or second strand comprise a sequence of 15 contiguous nt from the sequence of a first and/or second strand of: AD-39865.1 (SEQ ID NOs: 328 and 755), or a modified or unmodified variant thereof.

[3505] A RNAi agent comprising a first and a second strand, wherein the sequence of the first and/or second strand comprise a sequence of 15 contiguous nt from the sequence of a first and/or second strand of: AD-39871.1 (SEQ ID NOs: 329 and 756), or a modified or unmodified variant thereof.

[3506] A RNAi agent comprising a first and a second strand, wherein the sequence of the first and/or second strand comprise a sequence of 15 contiguous nt from the sequence of a first and/or second strand of: AD-39830.1 (SEQ ID NOs: 330 and 757), or a modified or unmodified variant thereof.

[3507] A RNAi agent comprising a first and a second strand, wherein the sequence of the first and/or second strand comprise a sequence of 15 contiguous nt from the sequence of a first and/or second strand of: AD-39836.1 (SEQ ID NOs: 331 and 758), or a modified or unmodified variant thereof.

[3508] A RNAi agent comprising a first and a second strand, wherein the sequence of the first and/or second strand comprise a sequence of 15 contiguous nt from the sequence of a first and/or second strand of: AD-39842.1 (SEQ ID NOs: 332 and 759), or a modified or unmodified variant thereof.

[3509] A RNAi agent comprising a first and a second strand, wherein the sequence of the first and/or second strand comprise a sequence of 15 contiguous nt from the sequence of a first and/or second strand of: AD-39848.1 (SEQ ID NOs: 333 and 760), or a modified or unmodified variant thereof.

[3510] A RNAi agent comprising a first and a second strand, wherein the sequence of the first and/or second strand comprise a sequence of 15 contiguous nt from the sequence of a first and/or second strand of: AD-39854.1 (SEQ ID NOs: 334 and 761), or a modified or unmodified variant thereof.

[3511] A RNAi agent comprising a first and a second strand, wherein the sequence of the first and/or second strand comprise a sequence of 15 contiguous nt from the sequence of a first and/or second strand of: AD-39860.1 (SEQ ID NOs: 335 and 762), or a modified or unmodified variant thereof.

[3512] A RNAi agent comprising a first and a second strand, wherein the sequence of the first and/or second strand comprise a sequence of 15 contiguous nt from the sequence of a first and/or second strand of: AD-39866.1 (SEQ ID NOs: 336 and 763), or a modified or unmodified variant thereof.

[3513] A RNAi agent comprising a first and a second strand, wherein the sequence of the first and/or second strand comprise a sequence of 15 contiguous nt from the sequence of a first and/or second strand of: AD-39992.1 (SEQ ID NOs: 337 and 764), or a modified or unmodified variant thereof.

[3514] A RNAi agent comprising a first and a second strand, wherein the sequence of the first and/or second strand comprise a sequence of 15 contiguous nt from the sequence of a first and/or second strand of: AD-39998.1 (SEQ ID NOs: 338 and 765), or a modified or unmodified variant thereof.

[3515] A RNAi agent comprising a first and a second strand, wherein the sequence of the first and/or second strand comprise a sequence of 15 contiguous nt from the sequence of a first and/or second strand of: AD-40004.1 (SEQ ID NOs: 339 and 766), or a modified or unmodified variant thereof.

[3516] A RNAi agent comprising a first and a second strand, wherein the sequence of the first and/or second strand comprise a sequence of 15 contiguous nt from the sequence of a first and/or second strand of: AD-40010.1 (SEQ ID NOs: 340 and 767), or a modified or unmodified variant thereof.

[3517] A RNAi agent comprising a first and a second strand, wherein the sequence of the first and/or second strand comprise a sequence of 15 contiguous nt from the sequence of a first and/or second strand of: AD-40016.1 (SEQ ID NOs: 341 and 768), or a modified or unmodified variant thereof.

[3518] A RNAi agent comprising a first and a second strand, wherein the sequence of the first and/or second strand comprise a sequence of 15 contiguous nt from the sequence of a first and/or second strand of: AD-40022.1 (SEQ ID NOs: 342 and 769), or a modified or unmodified variant thereof.

[3519] A RNAi agent comprising a first and a second strand, wherein the sequence of the first and/or second strand comprise a sequence of 15 contiguous nt from the sequence of a first and/or second strand of: AD-40028.1 (SEQ ID NOs: 343 and 770), or a modified or unmodified variant thereof.

[3520] A RNAi agent comprising a first and a second strand, wherein the sequence of the first and/or second strand comprise a sequence of 15 contiguous nt from the sequence of a first and/or second strand of: AD-40034.1 (SEQ ID NOs: 344 and 771), or a modified or unmodified variant thereof.

[3521] A RNAi agent comprising a first and a second strand, wherein the sequence of the first and/or second strand comprise a sequence of 15 contiguous nt from the sequence of a first and/or second strand of: AD-39999.1 (SEQ ID NOs: 345 and 772), or a modified or unmodified variant thereof.

[3522] A RNAi agent comprising a first and a second strand, wherein the sequence of the first second strand of: AD-40005.1 (SEQ ID NOs: 346 and 773), or a modified or unmodified variant thereof.

[3523] A RNAi agent comprising a first and a second strand, wherein the sequence of the first and/or second strand comprise a sequence of 15 contiguous nt from the sequence of a first and/or second strand of: AD-40011.1 (SEQ ID NOs: 347 and 774), or a modified or unmodified variant thereof.

[3524] A RNAi agent comprising a first and a second strand, wherein the sequence of the first and/or second strand comprise a sequence of 15 contiguous nt from the sequence of a first and/or second strand of: AD-40017.1 (SEQ ID NOs: 348 and 775), or a modified or unmodified variant thereof.

[3525] A RNAi agent comprising a first and a second strand, wherein the sequence of the first and/or second strand comprise a sequence of 15 contiguous nt from the sequence of a first and/or second strand of: AD-40029.1 (SEQ ID NOs: 349 and 776), or a modified or unmodified variant thereof.

[3526] A RNAi agent comprising a first and a second strand, wherein the sequence of the first and/or second strand comprise a sequence of 15 contiguous nt from the sequence of a first and/or second strand of: AD-40035.1 (SEQ ID NOs: 350 and 777), or a modified or unmodified variant thereof.

[3527] A RNAi agent comprising a first and a second strand, wherein the sequence of the first and/or second strand comprise a sequence of 15 contiguous nt from the sequence of a first and/or second strand of: AD-39994.1 (SEQ ID NOs: 351 and 778), or a modified or unmodified variant thereof.

[3528] A RNAi agent comprising a first and a second strand, wherein the sequence of the first and/or second strand comprise a sequence of 15 contiguous nt from the sequence of a first and/or second strand of: AD-40000.1 (SEQ ID NOs: 352 and 779), or a modified or unmodified variant thereof.

[3529] A RNAi agent comprising a first and a second strand, wherein the sequence of the first and/or second strand comprise a sequence of 15 contiguous nt from the sequence of a first and/or second strand of: AD-40006.1 (SEQ ID NOs: 353 and 780), or a modified or unmodified variant thereof.

[3530] A RNAi agent comprising a first and a second strand, wherein the sequence of the first and/or second strand comprise a sequence of 15 contiguous nt from the sequence of a first and/or second strand of: AD-40012.1 (SEQ ID NOs: 354 and 781), or a modified or unmodified variant thereof.

[3531] A RNAi agent comprising a first and a second strand, wherein the sequence of the first and/or second strand comprise a sequence of 15 contiguous nt from the sequence of a first and/or second strand of: AD-40018.1 (SEQ ID NOs: 355 and 782), or a modified or unmodified variant thereof.

[3532] A RNAi agent comprising a first and a second strand, wherein the sequence of the first and/or second strand comprise a sequence of 15 contiguous nt from the sequence of a first and/or second strand of: AD-40024.1 (SEQ ID NOs: 356 and 783), or a modified or unmodified variant thereof.

[3533] A RNAi agent comprising a first and a second strand, wherein the sequence of the first and/or second strand comprise a sequence of 15 contiguous nt from the sequence of a first and/or second strand of: AD-40030.1 (SEQ ID NOs: 357 and 784), or a modified or unmodified variant thereof.

[3534] A RNAi agent comprising a first and a second strand, wherein the sequence of the first and/or second strand comprise a sequence of 15 contiguous nt from the sequence of a first and/or second strand of: AD-40036.1 (SEQ ID NOs: 358 and 785), or a modified or unmodified variant thereof.

[3535] A RNAi agent comprising a first and a second strand, wherein the sequence of the first and/or second strand comprise a sequence of 15 contiguous nt from the sequence of a first and/or second strand of: AD-39995.1 (SEQ ID NOs: 359 and 786), or a modified or unmodified variant thereof.

[3536] A RNAi agent comprising a first and a second strand, wherein the sequence of the first and/or second strand comprise a sequence of 15 contiguous nt from the sequence of a first and/or second strand of: AD-40001.1 (SEQ ID NOs: 360 and 787), or a modified or unmodified variant thereof.

[3537] A RNAi agent comprising a first and a second strand, wherein the sequence of the first and/or second strand comprise a sequence of 15 contiguous nt from the sequence of a first and/or second strand of: AD-40007.1 (SEQ ID NOs: 361 and 788), or a modified or unmodified variant thereof.

[3538] A RNAi agent comprising a first and a second strand, wherein the sequence of the first and/or second strand comprise a sequence of 15 contiguous nt from the sequence of a first and/or second strand of: AD-40013.1 (SEQ ID NOs: 362 and 789), or a modified or unmodified variant thereof.

[3539] A RNAi agent comprising a first and a second strand, wherein the sequence of the first and/or second strand comprise a sequence of 15 contiguous nt from the sequence of a first and/or second strand of: AD-40019.1 (SEQ ID NOs: 363 and 790), or a modified or unmodified variant thereof.

[3540] A RNAi agent comprising a first and a second strand, wherein the sequence of the first and/or second strand comprise a sequence of 15 contiguous nt from the sequence of a first and/or second strand of: AD-40025.1 (SEQ ID NOs: 364 and 791), or a modified or unmodified variant thereof.

[3541] A RNAi agent comprising a first and a second strand, wherein the sequence of the first and/or second strand comprise a sequence of 15 contiguous nt from the sequence of a first and/or second strand of: AD-40031.1 (SEQ ID NOs: 365 and 792), or a modified or unmodified variant thereof.

[3542] A RNAi agent comprising a first and a second strand, wherein the sequence of the first and/or second strand comprise a sequence of 15 contiguous nt from the sequence of a first and/or second strand of: AD-40037.1 (SEQ ID NOs: 366 and 793), or a modified or unmodified variant

[3543] A RNAi agent comprising a first and a second strand, wherein the sequence of the first and/or second strand comprise a sequence of 15 contiguous nt from the sequence of a first and/or second strand of: AD-39996.1 (SEQ ID NOs: 367 and 794), or a modified or unmodified variant thereof.

[3544] A RNAi agent comprising a first and a second strand, wherein the sequence of the first and/or second strand comprise a sequence of 15 contiguous nt from the sequence of a first and/or second strand of: AD-40002.1 (SEQ ID NOs: 368 and 795), or a modified or unmodified variant thereof.

[3545] A RNAi agent comprising a first and a second strand, wherein the sequence of the first and/or second strand comprise a sequence of 15 contiguous nt from the sequence of a first and/or second strand of: AD-40008.1 (SEQ ID NOs: 369 and 796), or a modified or unmodified variant thereof.

[3546] A RNAi agent comprising a first and a second strand, wherein the sequence of the first and/or second strand comprise a sequence of 15 contiguous nt from the sequence of a first and/or second strand of: AD-40014.1 (SEQ ID NOs: 370 and 797), or a modified or unmodified variant thereof.

[3547] A RNAi agent comprising a first and a second strand, wherein the sequence of the first and/or second strand comprise a sequence of 15 contiguous nt from the sequence of a first and/or second strand of: AD-40020.1 (SEQ ID NOs: 371 and 798), or a modified or unmodified variant thereof.

[3548] A RNAi agent comprising a first and a second strand, wherein the sequence of the first and/or second strand comprise a sequence of 15 contiguous nt from the sequence of a first and/or second strand of: AD-40026.1 (SEQ ID NOs: 372 and 799), or a modified or unmodified variant thereof.

[3549] A RNAi agent comprising a first and a second strand, wherein the sequence of the first and/or second strand comprise a sequence of 15 contiguous nt from the sequence of a first and/or second strand of: AD-40032.1 (SEQ ID NOs: 373 and 800), or a modified or unmodified variant thereof.

[3550] A RNAi agent comprising a first and a second strand, wherein the sequence of the first and/or second strand comprise a sequence of 15 contiguous nt from the sequence of a first and/or second strand of: AD-40038.1 (SEQ ID NOs: 374 and 801), or a modified or unmodified variant thereof.

[3551] A RNAi agent comprising a first and a second strand, wherein the sequence of the first and/or second strand comprise a sequence of 15 contiguous nt from the sequence of a first and/or second strand of: AD-39997.1 (SEQ ID NOs: 375 and 802), or a modified or unmodified variant thereof.

[3552] A RNAi agent comprising a first and a second strand, wherein the sequence of the first and/or second strand comprise a sequence of 15 contiguous nt from the sequence of a first and/or second strand of: AD-40009.1 (SEQ ID NOs: 376 and 803), or a modified or unmodified variant thereof.

[3553] A RNAi agent comprising a first and a second strand, wherein the sequence of the first and/or second strand comprise a sequence of 15 contiguous nt from the sequence of a first and/or second strand of: AD-40015.1 (SEQ ID NOs: 377 and 804), or a modified or unmodified variant thereof.

[3554] A RNAi agent comprising a first and a second strand, wherein the sequence of the first and/or second strand comprise a sequence of 15 contiguous nt from the sequence of a first and/or second strand of: AD-40021.1 (SEQ ID NOs: 378 and 805), or a modified or unmodified variant thereof.

[3555] A RNAi agent comprising a first and a second strand, wherein the sequence of the first and/or second strand comprise a sequence of 15 contiguous nt from the sequence of a first and/or second strand of: AD-40027.1 (SEQ ID NOs: 379 and 806), or a modified or unmodified variant thereof.

[3556] A RNAi agent comprising a first and a second strand, wherein the sequence of the first and/or second strand comprise a sequence of 15 contiguous nt from the sequence of a first and/or second strand of: AD-40033.1 (SEQ ID NOs: 380 and 807), or a modified or unmodified variant thereof.

[3557] A RNAi agent comprising a first and a second strand, wherein the sequence of the first and/or second strand comprise a sequence of 15 contiguous nt from the sequence of a first and/or second strand of: AD-40039.1 (SEQ ID NOs: 381 and 808), or a modified or unmodified variant thereof.

[3558] A RNAi agent comprising a first and a second strand, wherein the sequence of the first and/or second strand comprise a sequence of 15 contiguous nt from the sequence of a first and/or second strand of: AD-40045.1 (SEQ ID NOs: 382 and 809), or a modified or unmodified variant thereof.

[3559] A RNAi agent comprising a first and a second strand, wherein the sequence of the first and/or second strand comprise a sequence of 15 contiguous nt from the sequence of a first and/or second strand of: AD-40051.1 (SEQ ID NOs: 383 and 810), or a modified or unmodified variant thereof.

[3560] A RNAi agent comprising a first and a second strand, wherein the sequence of the first and/or second strand comprise a sequence of 15 contiguous nt from the sequence of a first and/or second strand of: AD-40057.1 (SEQ ID NOs: 384 and 811), or a modified or unmodified variant thereof.

[3561] A RNAi agent comprising a first and a second strand, wherein the sequence of the first and/or second strand comprise a sequence of 15 contiguous nt from the sequence of a first and/or second strand of: AD-40063.1 (SEQ ID NOs: 385 and 812), or a modified or unmodified variant thereof.

[3562] A RNAi agent comprising a first and a second strand, wherein the sequence of the first and/or second strand comprise a sequence of 15 contiguous nt from the sequence of a first and/or second strand of: AD-40069.1 (SEQ ID NOs: 386 and 813), or a modified or unmodified variant thereof.

[3563] A RNAi agent comprising a first and a second strand, wherein the sequence of the first second strand of: AD-40075.1 (SEQ ID NOs: 387 and 814), or a modified or unmodified variant thereof.

[3564] A RNAi agent comprising a first and a second strand, wherein the sequence of the first and/or second strand comprise a sequence of 15 contiguous nt from the sequence of a first and/or second strand of: AD-40081.1 (SEQ ID NOs: 388 and 815), or a modified or unmodified variant thereof.

[3565] A RNAi agent comprising a first and a second strand, wherein the sequence of the first and/or second strand comprise a sequence of 15 contiguous nt from the sequence of a first and/or second strand of: AD-40040.1 (SEQ ID NOs: 389 and 816), or a modified or unmodified variant thereof.

[3566] A RNAi agent comprising a first and a second strand, wherein the sequence of the first and/or second strand comprise a sequence of 15 contiguous nt from the sequence of a first and/or second strand of: AD-40046.1 (SEQ ID NOs: 390 and 817), or a modified or unmodified variant thereof.

[3567] A RNAi agent comprising a first and a second strand, wherein the sequence of the first and/or second strand comprise a sequence of 15 contiguous nt from the sequence of a first and/or second strand of: AD-40052.1 (SEQ ID NOs: 391 and 818), or a modified or unmodified variant thereof.

[3568] A RNAi agent comprising a first and a second strand, wherein the sequence of the first and/or second strand comprise a sequence of 15 contiguous nt from the sequence of a first and/or second strand of: AD-40058.1 (SEQ ID NOs: 392 and 819), or a modified or unmodified variant thereof.

[3569] A RNAi agent comprising a first and a second strand, wherein the sequence of the first and/or second strand comprise a sequence of 15 contiguous nt from the sequence of a first and/or second strand of: AD-40064.1 (SEQ ID NOs: 393 and 820), or a modified or unmodified variant thereof.

[3570] A RNAi agent comprising a first and a second strand, wherein the sequence of the first and/or second strand comprise a sequence of 15 contiguous nt from the sequence of a first and/or second strand of: AD-40070.1 (SEQ ID NOs: 394 and 821), or a modified or unmodified variant thereof.

[3571] A RNAi agent comprising a first and a second strand, wherein the sequence of the first and/or second strand comprise a sequence of 15 contiguous nt from the sequence of a first and/or second strand of: AD-40076.1 (SEQ ID NOs: 395 and 822), or a modified or unmodified variant thereof.

[3572] A RNAi agent comprising a first and a second strand, wherein the sequence of the first and/or second strand comprise a sequence of 15 contiguous nt from the sequence of a first and/or second strand of: AD-40082.1 (SEQ ID NOs: 396 and 823), or a modified or unmodified variant thereof.

[3573] A RNAi agent comprising a first and a second strand, wherein the sequence of the first and/or second strand comprise a sequence of 15 contiguous nt from the sequence of a first and/or second strand of: AD-40041.1 (SEQ ID NOs: 397 and 824), or a modified or unmodified variant thereof.

[3574] A RNAi agent comprising a first and a second strand, wherein the sequence of the first and/or second strand comprise a sequence of 15 contiguous nt from the sequence of a first and/or second strand of: AD-40047.1 (SEQ ID NOs: 398 and 825), or a modified or unmodified variant thereof.

[3575] A RNAi agent comprising a first and a second strand, wherein the sequence of the first and/or second strand comprise a sequence of 15 contiguous nt from the sequence of a first and/or second strand of: AD-40053.1 (SEQ ID NOs: 399 and 826), or a modified or unmodified variant thereof.

[3576] A RNAi agent comprising a first and a second strand, wherein the sequence of the first and/or second strand comprise a sequence of 15 contiguous nt from the sequence of a first and/or second strand of: AD-40059.1 (SEQ ID NOs: 400 and 827), or a modified or unmodified variant thereof.

[3577] A RNAi agent comprising a first and a second strand, wherein the sequence of the first and/or second strand comprise a sequence of 15 contiguous nt from the sequence of a first and/or second strand of: AD-40065.1 (SEQ ID NOs: 401 and 828), or a modified or unmodified variant thereof.

[3578] A RNAi agent comprising a first and a second strand, wherein the sequence of the first and/or second strand comprise a sequence of 15 contiguous nt from the sequence of a first and/or second strand of: AD-40071.1 (SEQ ID NOs: 402 and 829), or a modified or unmodified variant thereof.

[3579] A RNAi agent comprising a first and a second strand, wherein the sequence of the first and/or second strand comprise a sequence of 15 contiguous nt from the sequence of a first and/or second strand of: AD-40077.1 (SEQ ID NOs: 403 and 830), or a modified or unmodified variant thereof.

[3580] A RNAi agent comprising a first and a second strand, wherein the sequence of the first and/or second strand comprise a sequence of 15 contiguous nt from the sequence of a first and/or second strand of: AD-40083.1 (SEQ ID NOs: 404 and 831), or a modified or unmodified variant thereof.

[3581] A RNAi agent comprising a first and a second strand, wherein the sequence of the first and/or second strand comprise a sequence of 15 contiguous nt from the sequence of a first and/or second strand of: AD-40042.1 (SEQ ID NOs: 405 and 832), or a modified or unmodified variant thereof.

[3582] A RNAi agent comprising a first and a second strand, wherein the sequence of the first and/or second strand comprise a sequence of 15 contiguous nt from the sequence of a first and/or second strand of: AD-40048.1 (SEQ ID NOs: 406 and 833), or a modified or unmodified variant thereof.

[3583] A RNAi agent comprising a first and a second strand, wherein the sequence of the first and/or second strand comprise a sequence of 15 contiguous nt from the sequence of a first and/or second strand of: AD-40054.1 (SEQ ID NOs: 407 and 834), or a modified or unmodified variant

[3584] A RNAi agent comprising a first and a second strand, wherein the sequence of the first and/or second strand comprise a sequence of 15 contiguous nt from the sequence of a first and/or second strand of: AD-40060.1 (SEQ ID NOs: 408 and 835), or a modified or unmodified variant thereof.

[3585] A RNAi agent comprising a first and a second strand, wherein the sequence of the first and/or second strand comprise a sequence of 15 contiguous nt from the sequence of a first and/or second strand of: AD-40066.1 (SEQ ID NOs: 409 and 836), or a modified or unmodified variant thereof.

[3586] A RNAi agent comprising a first and a second strand, wherein the sequence of the first and/or second strand comprise a sequence of 15 contiguous nt from the sequence of a first and/or second strand of: AD-40072.1 (SEQ ID NOs: 410 and 837), or a modified or unmodified variant thereof.

[3587] A RNAi agent comprising a first and a second strand, wherein the sequence of the first and/or second strand comprise a sequence of 15 contiguous nt from the sequence of a first and/or second strand of: AD-40078.1 (SEQ ID NOs: 411 and 838), or a modified or unmodified variant thereof.

[3588] A RNAi agent comprising a first and a second strand, wherein the sequence of the first and/or second strand comprise a sequence of 15 contiguous nt from the sequence of a first and/or second strand of: AD-40084.1 (SEQ ID NOs: 412 and 839), or a modified or unmodified variant thereof.

[3589] A RNAi agent comprising a first and a second strand, wherein the sequence of the first and/or second strand comprise a sequence of 15 contiguous nt from the sequence of a first and/or second strand of: AD-40043.1 (SEQ ID NOs: 413 and 840), or a modified or unmodified variant thereof.

[3590] A RNAi agent comprising a first and a second strand, wherein the sequence of the first and/or second strand comprise a sequence of 15 contiguous nt from the sequence of a first and/or second strand of: AD-40049.1 (SEQ ID NOs: 414 and 841), or a modified or unmodified variant thereof.

[3591] A RNAi agent comprising a first and a second strand, wherein the sequence of the first and/or second strand comprise a sequence of 15 contiguous nt from the sequence of a first and/or second strand of: AD-40055.1 (SEQ ID NOs: 415 and 842), or a modified or unmodified variant thereof.

[3592] A RNAi agent comprising a first and a second strand, wherein the sequence of the first and/or second strand comprise a sequence of 15 contiguous nt from the sequence of a first and/or second strand of: AD-40061.1 (SEQ ID NOs: 416 and 843), or a modified or unmodified variant thereof.

[3593] A RNAi agent comprising a first and a second strand, wherein the sequence of the first and/or second strand comprise a sequence of 15 contiguous nt from the sequence of a first and/or second strand of: AD-40067.1 (SEQ ID NOs: 417 and 844), or a modified or unmodified variant thereof.

[3594] A RNAi agent comprising a first and a second strand, wherein the sequence of the first and/or second strand comprise a sequence of 15 contiguous nt from the sequence of a first and/or second strand of: AD-40073.1 (SEQ ID NOs: 418 and 845), or a modified or unmodified variant thereof.

[3595] A RNAi agent comprising a first and a second strand, wherein the sequence of the first and/or second strand comprise a sequence of 15 contiguous nt from the sequence of a first and/or second strand of: AD-40079.1 (SEQ ID NOs: 419 and 846), or a modified or unmodified variant thereof.

[3596] A RNAi agent comprising a first and a second strand, wherein the sequence of the first and/or second strand comprise a sequence of 15 contiguous nt from the sequence of a first and/or second strand of: AD-40085.1 (SEQ ID NOs: 420 and 847), or a modified or unmodified variant thereof.

[3597] A RNAi agent comprising a first and a second strand, wherein the sequence of the first and/or second strand comprise a sequence of 15 contiguous nt from the sequence of a first and/or second strand of: AD-40044.1 (SEQ ID NOs: 421 and 848), or a modified or unmodified variant thereof.

[3598] A RNAi agent comprising a first and a second strand, wherein the sequence of the first and/or second strand comprise a sequence of 15 contiguous nt from the sequence of a first and/or second strand of: AD-40050.1 (SEQ ID NOs: 422 and 849), or a modified or unmodified variant thereof.

[3599] A RNAi agent comprising a first and a second strand, wherein the sequence of the first and/or second strand comprise a sequence of 15 contiguous nt from the sequence of a first and/or second strand of: AD-40056.1 (SEQ ID NOs: 423 and 850), or a modified or unmodified variant thereof.

[3600] A RNAi agent comprising a first and a second strand, wherein the sequence of the first and/or second strand comprise a sequence of 15 contiguous nt from the sequence of a first and/or second strand of: AD-40062.1 (SEQ ID NOs: 424 and 851), or a modified or unmodified variant thereof.

[3601] A RNAi agent comprising a first and a second strand, wherein the sequence of the first and/or second strand comprise a sequence of 15 contiguous nt from the sequence of a first and/or second strand of: AD-40068.1 (SEQ ID NOs: 425 and 852), or a modified or unmodified variant thereof.

[3602] A RNAi agent comprising a first and a second strand, wherein the sequence of the first and/or second strand comprise a sequence of 15 contiguous nt from the sequence of a first and/or second strand of: AD-40074.1 (SEQ ID NOs: 426 and 853), or a modified or unmodified variant thereof.

[3603] A RNAi agent comprising a first and a second strand, wherein the sequence of the first and/or second strand comprise a sequence of 15 contiguous nt from the sequence of a first and/or second strand of: AD-40080.1 (SEQ ID NOs: 427 and 854), or a modified or unmodified variant thereof.

[3604] A RNAi agent comprising a first and a second strand, wherein the sequence of the first and/or second strand comprise a sequence of 15 contiguous nt from the sequence of a first and/or second strand of: AD-39720.1 (SEQ ID NOs: 1716 and 1754), or a modified or unmodified variant thereof.

[3605] A RNAi agent comprising a first and a second strand, wherein the sequence of the first and/or second strand comprise a sequence of 15 contiguous nt from the sequence of a first and/or second strand of: AD-39706.1 (SEQ ID NOs: 1717 and 1755), or a modified or unmodified variant thereof.

[3606] A RNAi agent comprising a first and a second strand, wherein the sequence of the first and/or second strand comprise a sequence of 15 contiguous nt from the sequence of a first and/or second strand of: AD-39712.1 (SEQ ID NOs: 1718 and 1756), or a modified or unmodified variant thereof.

[3607] A RNAi agent comprising a first and a second strand, wherein the sequence of the first and/or second strand comprise a sequence of 15 contiguous nt from the sequence of a first and/or second strand of: AD-39760.1 (SEQ ID NOs: 1719 and 1757), or a modified or unmodified variant thereof.

[3608] A RNAi agent comprising a first and a second strand, wherein the sequence of the first and/or second strand comprise a sequence of 15 contiguous nt from the sequence of a first and/or second strand of: AD-39732.1 (SEQ ID NOs: 1720 and 1758), or a modified or unmodified variant thereof.

[3609] A RNAi agent comprising a first and a second strand, wherein the sequence of the first and/or second strand comprise a sequence of 15 contiguous nt from the sequence of a first and/or second strand of: AD-35541.4 (SEQ ID NOs: 1721 and 1759), or a modified or unmodified variant thereof.

[3610] A RNAi agent comprising a first and a second strand, wherein the sequence of the first and/or second strand comprise a sequence of 15 contiguous nt from the sequence of a first and/or second strand of: AD-39735.1 or hs_KRAS_{—}321_A22S26 (SEQ ID NOs: 1722 and 1760), or a modified or unmodified variant thereof.

[3611] A RNAi agent comprising a first and a second strand, wherein the sequence of the first and/or second strand comprise a sequence of 15 contiguous nt from the sequence of a first and/or second strand of: AD-39741.1, or a modified or unmodified variant thereof.

[3612] A RNAi agent comprising a first and a second strand, wherein the sequence of the first and/or second strand comprise a sequence of 15 contiguous nt from the sequence of a first and/or second strand of: hs_KRAS_{—}322_A22S26 (SEQ ID NOs: 1723 and 1761), or a modified or unmodified variant thereof.

[3613] A RNAi agent comprising a first and a second strand, wherein the sequence of the first and/or second strand comprise a sequence of 15 contiguous nt from the sequence of a first and/or second strand of: AD-39778.1 (SEQ ID NOs: 1724 and 1762), or a modified or unmodified variant thereof.

[3614] A RNAi agent comprising a first and a second strand, wherein the sequence of the first and/or second strand comprise a sequence of 15 contiguous nt from the sequence of a first and/or second strand of: AD-39790.1 (SEQ ID NOs: 1725 and 1763), or a modified or unmodified variant thereof.

[3615] A RNAi agent comprising a first and a second strand, wherein the sequence of the first and/or second strand comprise a sequence of 15 contiguous nt from the sequence of a first and/or second strand of: AD-39822.1 (SEQ ID NOs: 1726 and 1764), or a modified or unmodified variant thereof.

[3616] A RNAi agent comprising a first and a second strand, wherein the sequence of the first and/or second strand comprise a sequence of 15 contiguous nt from the sequence of a first and/or second strand of: AD-35609.4 (SEQ ID NOs: 1727 and 1765), or a modified or unmodified variant thereof.

[3617] A RNAi agent comprising a first and a second strand, wherein the sequence of the first and/or second strand comprise a sequence of 15 contiguous nt from the sequence of a first and/or second strand of: AD-35581.4 (SEQ ID NOs: 1728 and 1766), or a modified or unmodified variant thereof.

[3618] A RNAi agent comprising a first and a second strand, wherein the sequence of the first and/or second strand comprise a sequence of 15 contiguous nt from the sequence of a first and/or second strand of: AD-39845.1 (SEQ ID NOs: 1729 and 1767), or a modified or unmodified variant thereof.

[3619] A RNAi agent comprising a first and a second strand, wherein the sequence of the first and/or second strand comprise a sequence of 15 contiguous nt from the sequence of a first and/or second strand of: AD-39858.1 (SEQ ID NOs: 1730 and 1768), or a modified or unmodified variant thereof.

[3620] A RNAi agent comprising a first and a second strand, wherein the sequence of the first and/or second strand comprise a sequence of 15 contiguous nt from the sequence of a first and/or second strand of: AD-39870.1 (SEQ ID NOs: 1731 and 1769), or a modified or unmodified variant thereof.

[3621] A RNAi agent comprising a first and a second strand, wherein the sequence of the first and/or second strand comprise a sequence of 15 contiguous nt from the sequence of a first and/or second strand of: AD-35576.4 (SEQ ID NOs: 1732 and 1770), or a modified or unmodified variant thereof.

[3622] A RNAi agent comprising a first and a second strand, wherein the sequence of the first and/or second strand comprise a sequence of 15 contiguous nt from the sequence of a first and/or second strand of: AD-35588.4 (SEQ ID NOs: 1733 and 1771), or a modified or unmodified variant thereof.

[3623] A RNAi agent comprising a first and a second strand, wherein the sequence of the first and/or second strand comprise a sequence of 15 contiguous nt from the sequence of a first and/or second strand of: AD-35600.1 (SEQ ID NOs: 1734 and 1772), or a modified or unmodified variant thereof.

[3624] A RNAi agent comprising a first and a second strand, wherein the sequence of the first and/or second strand comprise a sequence of 15 contiguous nt from the sequence of a first and/or second strand of: AD-35606.1 (SEQ ID NOs: 1735 and 1773), or a modified or unmodified variant thereof.

[3625] A RNAi agent comprising a first and a second strand, wherein the sequence of the first and/or second strand comprise a sequence of 15 contiguous nt from the sequence of a first and/or second strand of: AD-38151.1 (SEQ ID NOs: 1736 and 1774), or a modified or unmodified variant thereof.

[3626] A RNAi agent comprising a first and a second strand, wherein the sequence of the first and/or second strand comprise a sequence of 15 contiguous nt from the sequence of a first and/or second strand of: AD-38163.1 (SEQ ID NOs: 1737 and 1775), or a modified or unmodified variant thereof.

[3627] A RNAi agent comprising a first and a second strand, wherein the sequence of the first and/or second strand comprise a sequence of 15 contiguous nt from the sequence of a first and/or second strand of: AD-39999.1 (SEQ ID NOs: 1738 and 1776), or a modified or unmodified variant thereof.

[3628] A RNAi agent comprising a first and a second strand, wherein the sequence of the first and/or second strand comprise a sequence of 15 contiguous nt from the sequence of a first and/or second strand of: AD-38159.1 or hs_KRAS_{—}528_A22S26 (SEQ ID NOs: 1739 and 1777), or a modified or unmodified variant thereof.

[3629] A RNAi agent comprising a first and a second strand, wherein the sequence of the first and/or second strand comprise a sequence of 15 contiguous nt from the sequence of a first and/or second strand of: AD-38130.1 or hs_KRAS_{—}531_A22S26 (SEQ ID NOs: 1740 and 1778), or a modified or unmodified variant thereof.

[3630] A RNAi agent comprising a first and a second strand, wherein the sequence of the first and/or second strand comprise a sequence of 15 contiguous nt from the sequence of a first and/or second strand of: AD-38136.1 (SEQ ID NOs: 1741 and 1779), or a modified or unmodified variant thereof.

[3631] A RNAi agent comprising a first and a second strand, wherein the sequence of the first and/or second strand comprise a sequence of 15 contiguous nt from the sequence of a first and/or second strand of: AD-40036.1 (SEQ ID NOs: 1742 and 1780), or a modified or unmodified variant thereof.

[3632] A RNAi agent comprising a first and a second strand, wherein the sequence of the first and/or second strand comprise a sequence of 15 contiguous nt from the sequence of a first and/or second strand of: AD-40008.1 (SEQ ID NOs: 1743 and 1781), or a modified or unmodified variant thereof.

[3633] A RNAi agent comprising a first and a second strand, wherein the sequence of the first and/or second strand comprise a sequence of 15 contiguous nt from the sequence of a first and/or second strand of: AD-40021.1 (SEQ ID NOs: 1744 and 1782), or a modified or unmodified variant thereof.

[3634] A RNAi agent comprising a first and a second strand, wherein the sequence of the first and/or second strand comprise a sequence of 15 contiguous nt from the sequence of a first and/or second strand of: AD-40077.1 (SEQ ID NOs: 1745 and 1783), or a modified or unmodified variant thereof.

[3635] A RNAi agent comprising a first and a second strand, wherein the sequence of the first and/or second strand comprise a sequence of 15 contiguous nt from the sequence of a first and/or second strand of: AD-40072.1 (SEQ ID NOs: 1746 and 1784), or a modified or unmodified variant thereof.

[3636] A RNAi agent comprising a first and a second strand, wherein the sequence of the first and/or second strand comprise a sequence of 15 contiguous nt from the sequence of a first and/or second strand of: AD-40061.1 (SEQ ID NOs: 1747 and 1785), or a modified or unmodified variant thereof.

[3637] A RNAi agent comprising a first and a second strand, wherein the sequence of the first and/or second strand comprise a sequence of 15 contiguous nt from the sequence of a first and/or second strand of: AD-40068.1 (SEQ ID NOs: 1748 and 1786), or a modified or unmodified variant thereof.

[3638] A RNAi agent comprising a first and a second strand, wherein the sequence of the first and/or second strand comprise a sequence of 15 contiguous nt from the sequence of a first and/or second strand of: AD-38131.1 (SEQ ID NOs: 1749 and 1787), or a modified or unmodified variant thereof.

[3639] A RNAi agent comprising a first and a second strand, wherein the sequence of the first and/or second strand comprise a sequence of 15 contiguous nt from the sequence of a first and/or second strand of: AD-38167.1 (SEQ ID NOs: 1750 and 1788), or a modified or unmodified variant thereof.

[3640] A RNAi agent comprising a first and a second strand, wherein the sequence of the first and/or second strand comprise a sequence of 15 contiguous nt from the sequence of a first and/or second strand of: hs_KRAS 1273_A22S26 (SEQ ID NOs: 1751 and 1789), or a modified or unmodified variant thereof.

[3641] A RNAi agent comprising a first and a second strand, wherein the sequence of the first and/or second strand comprise a sequence of 15 contiguous nt from the sequence of a first and/or second strand of: hs_KRAS 2892_A37S26 (SEQ ID NOs: 1752 and 1790), or a modified or unmodified variant thereof.

[3642] A RNAi agent comprising a first and a second strand, wherein the sequence of the first and/or second strand comprise a sequence of 15 contiguous nt from the sequence of a first and/or second strand of: hs_KRAS 4731_A22S26 (SEQ ID NOs: 1753 and 1791), or a modified or unmodified variant thereof.

[3643] In various embodiments, the disclosure comprises a RNAi agent comprising a sense and an antisense strand, wherein the antisense strand comprises at least 15 contiguous nucleotides differing by 0, 1, 2, or 3 nt from the antisense strand of any RNAi agent disclosed herein, or a modified or unmodified variant thereof, wherein the antisense strand optionally further comprises 0, 1, 2, 3, 4, 5, 6, 7, 8, 9, or 10 or more nt (or any range thereof, e.g., 0-1, 1-2, 1-3, 1-4 nt, etc.).

[3644] In one embodiment, the disclosure comprises any one or more RNAi agent listed herein.

[3645] Overlapping sets of RNAi agents to KRAS

[3646] In various embodiments, the present disclosure relates to groups of RNAi agents to KRAS with overlapping sequences. Thus, the present disclosure encompasses groups of RNAi agents wherein each RNAi agent in the group overlaps with each other RNAi agent in the same group by at least 5, 6, 7, 8, 9, 10, 11, 12, 13, 14, 15, 16, 17, 18, 19 or more nucleotides. Particularly, in one embodiment, the overlap is at least 12 nt.

[3647] Some of the RNAi agents listed herein overlap each other in sequence. Table 2 presents a compilation of some of these groups of overlapping RNAi agents, wherein each member of a group overlaps with each other member of the same group by at least 12 nt. A 12-nt portion of the overlap of the sense and anti-sense strand are presented.

[3648] Thus, for example, as shown in Table 4, the sequences of duplexes AD-39695.1, AD-39689.1,AD-39707.1, AD-39683.1, and AD-39701.1 all overlap, wherein the overlap in sense strand comprises the sequence CUGAAUAUAAAC (SEQ ID NO: 1874) and the overlap in the anti-sense strand comprises the sequence GUUUAUAUUCAG (SEQ ID NO: 1875).

[3649] However, in the present disclosure encompasses any set or subset or group or subgroup of KRAS RNAi agents which share the common technical feature of a sequence overlap (e.g., by at least 12 nt). Thus the present disclosure also encompasses the example groups of AD-39695.1, AD-39689.1, AD-39707.1, AD-39683.1, and AD-39701.1, but also these subgroups: AD-39695.1 and AD-39689.1; AD-39695.1 and AD-39707.1; AD-39695.1, AD-39689.1, and AD-39701.1; AD-39689.1, AD-39707.1, and AD-39701.1; AD-39707.1 and AD-39683.1; AD-39707.1, AD-39683.1, and AD-39701.1; etc, and any other group of overlapping KRAS RNAi agents.

[3650] Thus, these and other various sets of overlapping RNAi agents presented in Table 4 share common technical features, for example, the overlap in the sense and anti-sense strand.

[3651] Particular sets of overlapping RNAi agents to KRAS are provided below in Table 4.

[3652] The present disclosure thus encompasses any group or subgroup of RNAi agents comprising a common technical feature, wherein the common technical feature is an overlap (e.g., of at least 12 nt) of a sequence in the sense or anti-sense strand.

[3653] Thus:

[3654] The present disclosure encompasses a RNAi agent comprising a first and a second strand, wherein the first strand comprises at least 15 contiguous nucleotides differing by 0, 1, 2, or 3 nt from the first strand of, and/or the second strand comprises at least 15 contiguous nucleotides differing by 0, 1, 2, or 3 nt from the second strand, of any of the group or subgroup or set or subset of overlapping RNAi agents presented in Table 4.

[3655] The present disclosure similarly encompasses various embodiments encompassing groups of overlapping RNAi agents presented in Table 4.

[3656] Additional Definitions

[3657] Unless defined otherwise, the technical and scientific terms used herein have the same meaning as that usually understood by a specialist familiar with the field to which the present disclosure belongs.

[3658] Unless indicated otherwise, all methods, steps, techniques and manipulations that are not specifically described in detail can be performed and have been performed in a manner known per se, as will be clear to the skilled person. Reference is for example again made to the standard handbooks and the general background art mentioned herein and to the further references cited therein.

[3659] Claims to the present disclosure are non-limiting and are provided below.

[3660] Although particular embodiments and claims have been disclosed herein in detail, this has been done by way of example for purposes of illustration only, and is not intended to be limiting with respect to the scope of the appended claims, or the scope of subject matter of claims of any corresponding future application. In particular, it is contemplated by the inventors that various substitutions, alterations, and modifications may be made to the present disclosure without departing from the spirit and scope of the present disclosure as defined by the claims. The choice of nucleic acid starting material, clone of interest, or library type is believed to be a matter of routine for a person of ordinary skill in the art with knowledge of the embodiments described herein. Other aspects, advantages, and modifications considered to be within the scope of the following claims. Redrafting of claim scope in later-filed corresponding applications may be due to limitations by the patent laws of various countries and should not be interpreted as giving up subject matter of the claims.

[3661] Various additional formulations and obvious variants of the described RNAi agents to KRAS can be devised by those of ordinary skill in the art. Non-limiting example RNAi agents to KRAS are described in the Examples below, which do not limit the scope of the present disclosure as described in the claims.

### EXAMPLES

### Example 1

### Bioinformatics and KRAS RNAi Agent (siRNA) Sequences

[3662] The sequences of unmodifed and example modified KRAS RNAi agent sequences are provided in Tables 2 and 3, below.

[3663] KRAS oligonucleotide design is carried out to identify siRNAs targeting mRNAs encoding the KRAS gene.

[3664] Experimental Methods

[3665] Bioinformatics

[3666] Transcripts

[3667] siRNA design is carried out to identify RNAi agents (e.g., siRNAs) targeting the human Kirsten rat sarcoma viral oncogene (KRAS). Design uses the following transcripts from the NCBI RefSeq collection: KRAS—NM_{—}033360.2, NM_{—}004985.3. For KRAS, the requirement of perfect matching to the non-human primate Macaca fascicularis is waived.

[3668] siRNA Design and Specificity Prediction

[3669] The predicted specificity of all possible 19mers is predicted from each sequence. Candidate 19mers are then selected as matching Coding Sequence (“CDS”) or Untranslated Regions (“UTRs”). The candidate siRNAs for each gene (KRAS, 432 from CDS) are used in a comprehensive search against the human transcriptome (defined as the set of NM_{—} and XM_{—} records within the human NCBI Refseq set) using the FASTA algorithm. The perl script ‘parseFasta.pl’ is then used to parse the alignments and generate a score based on the position and number of mismatches between the siRNA and any potential ‘off-target’ transcript. The off-target score is weighted to emphasize differences in the ‘seed’ region of siRNAs, in positions 2-9 from the 5′ end of the molecule. Each oligo-transcript pair from the FASTA search is given a mismatch score by summing the individual mismatch scores; mismatches in the position 2-9 are counted as 2.8, mismatches in the cleavage site positions 10-11 are counted as 1.2, and mismatches in region 12-19 counted as 1.0. An additional off-target prediction is carried out by comparing the frequency of heptamers and octomers derived from 3 distinct, seed-derived hexamers of each oligo. The hexamers from positions 2-7 relative to the 5′ start is used to create 2 heptamers and one octomer. We create ‘heptamer1’ by adding a 3′ A to the hexamer; we create heptamer2 bp adding a 5′ A to the hexamer; we create the octomer by adding an A to both 5′ and 3′ ends of the hexamer. The frequency of octomers and heptamers in the human 3′UTRome (defined as the subsequence of the transcriptome from NCBI's Refseq database where the end of the coding region, the ‘CDS’, is clearly defined) is pre-calculated. The octomer frequency is normalized to the heptamer frequency using the median value from the range of octomer frequencies. A ‘mirSeedScore’ is then calculated by calculating the sum of [(3×normalized octomer count)+(2×heptamer2 count)+(1×heptamer1 count)].

[3670] Both siRNAs strands are assigned to a category of specificity according to the calculated scores: a score above 3 qualifies as highly specific, equal to 3 as specific and between 2.2 and 2.8 as moderately specific. We sorted by the specificity of the antisense strand.

[3671] siRNA Sequence Selection

[3672] Sense and antisense derived siRNA oligos are synthesized and formed into duplexes. The total numbers of duplexes per gene were: KRAS, 432.

[3673] Synthesis of KRAS Sequences

[3674] Synthesis:

[3675] KRAS sequences are synthesized on MerMade 192 synthesizer at 1 μmol scale. A total of 864 single strands (432 duplexes) for KRAS are synthesized for the human KRAS gene. For all the sequences, ‘endolight’ chemistry is applied as detailed below.
[3676] All pyrimidines (cytosine and uridine) in the sense strand are replaced with corresponding 2′-O-Methyl bases (2′ 0-Methyl C and 2′-O-Methyl U)
[3677] In the antisense strand, pyrimidines (C and U) adjacent to (towards 5′ position) ribo A nucleoside are replaced with their corresponding 2-O-Methyl nucleosides
[3678] A two base dTdT extension at 3′ end of both sense and anti sense sequences is introduced. This two base overhang has a phosphodiester linkage
[3679] The sequence file is converted to a text file to make it compatible for loading in the MerMade 192 synthesis software
[3680] A unique ID is generated for each single strand and these are shown in Tables 1 to 3.

[3681] The synthesis of KRAS sequences used solid supported oligonucleotide synthesis using phosphoramidite chemistry

[3682] The synthesis of the above sequences is performed at 1 μm scale in 96 well plates and 192 sequences are made per run. The amidite solutions are prepared at 0.1M concentration and ethyl thio tetrazole (0.6M in Acetonitrile) is used as activator.

[3683] Cleavage and Deprotection:

[3684] The synthesized sequences are cleaved and deprotected in 96 well plates, using a mixture of aqueous and ethanolic methylamine (3:1 ratio) in the first step and triethylamine ³HF in the second step. The crude sequences thus obtained are precipitated using acetone: ethanol mix and the pellet are re-suspended in 0.02M sodium acetate buffer. Samples from each sequence are analyzed by LC-MS and the resulting mass data confirmed the identity of the sequences. A selected set of samples are also analyzed by IEX chromatography.

[3685] Purification and Desalting:

[3686] All single strands are isolated as desalted solutions in water prior to annealing step. Sequences are purified on AKTA explorer purification system using Source 15Q column. Purification is performed using a column and in-line buffer heater set at 60° C. A single peak corresponding to the full length sequence is collected in the eluant and is subsequently analyzed for purity by ion exchange chromatography.

[3687] The purified sequences are desalted on a Sephadex G25 column using AKTA purifier. The desalted KRAS sequences are analyzed for concentration and purity. The single strands are annealed on an automated platform to form siRNA duplexes. Each duplex is made at a concentration of 10 μM in 1×PBS and are analyzed for purity by capillary gel electrophoresis. Details on individual duplexes are provided in Tables 1 to 3. Some sequences in Table 2, and other tables herein, represent the DNA target of the recited RNAi agent (these DNA targets comprise DNA sequences, comprising T, rather than RNA sequences, which comprise U).

TABLE 2
KRAS duplexes with unmodified sequences

| | | SEQ | | |
|---|---|---|---|---|
| | | ID | | SEQ ID |
| Duplex | Sense Seq | NO: | Antisense Seq | NO: |
| AD-35523.3 | GGACGAAUAUGAUCCAACA | 1 | UGUUGGAUCAUAUUCGUCC | 428 |
| AD-35529.1 | GACGAAUAUGAUCCAACAA | 2 | UUGUUGGAUCAUAUUCGUC | 429 |
| AD-35535.4 | ACGAAUAUGAUCCAACAAU | 3 | AUUGUUGGAUCAUAUUCGU | 430 |
| AD-35541.4 | CGAAUAUGAUCCAACAAUA | 4 | UAUUGUUGGAUCAUAUUCG | 431 |
| AD-35547.4 | GAAUAUGAUCCAACAAUAG | 5 | CUAUUGUUGGAUCAUAUUC | 432 |
| AD-35553.4 | AAUAUGAUCCAACAAUAGA | 6 | UCUAUUGUUGGAUCAUAUU | 433 |
| AD-35559.4 | AUAUGAUCCAACAAUAGAG | 7 | CUCUAUUGUUGGAUCAUAU | 434 |
| AD-35565.4 | UAUGAUCCAACAAUAGAGG | 8 | CCUCUAUUGUUGGAUCAUA | 435 |
| AD-35524.4 | AUGAUCCAACAAUAGAGGA | 9 | UCCUCUAUUGUUGGAUCAU | 436 |
| AD-35530.4 | UGAUCCAACAAUAGAGGAU | 10 | AUCCUCUAUUGUUGGAUCA | 437 |
| AD-35536.4 | GAUCCAACAAUAGAGGAUU | 11 | AAUCCUCUAUUGUUGGAUC | 438 |
| AD-35542.4 | AUCCAACAAUAGAGGAUUC | 12 | GAAUCCUCUAUUGUUGGAU | 439 |
| AD-35548.4 | UCCAACAAUAGAGGAUUCC | 13 | GGAAUCCUCUAUUGUUGGA | 440 |
| AD-35554.4 | CCAACAAUAGAGGAUUCCU | 14 | AGGAAUCCUCUAUUGUUGG | 441 |
| AD-35560.2 | CAACAAUAGAGGAUUCCUA | 15 | UAGGAAUCCUCUAUUGUUG | 442 |
| AD-35566.4 | AACAAUAGAGGAUUCCUAC | 16 | GUAGGAAUCCUCUAUUGUU | 443 |
| AD-35525.2 | ACAAUAGAGGAUUCCUACA | 17 | UGUAGGAAUCCUCUAUUGU | 444 |
| AD-35531.4 | CAAUAGAGGAUUCCUACAG | 18 | CUGUAGGAAUCCUCUAUUG | 445 |
| AD-35537.4 | AAUAGAGGAUUCCUACAGG | 19 | CCUGUAGGAAUCCUCUAUU | 446 |
| AD-35543.2 | AUAGAGGAUUCCUACAGGA | 20 | UCCUGUAGGAAUCCUCUAU | 447 |
| AD-35549.4 | UAGAGGAUUCCUACAGGAA | 21 | UUCCUGUAGGAAUCCUCUA | 448 |
| AD-35555.4 | AGAGGAUUCCUACAGGAAG | 22 | CUUCCUGUAGGAAUCCUCU | 449 |
| AD-35561.4 | GAGGAUUCCUACAGGAAGC | 23 | GCUUCCUGUAGGAAUCCUC | 450 |
| AD-35567.4 | AGGAUUCCUACAGGAAGCA | 24 | UGCUUCCUGUAGGAAUCCU | 451 |
| AD-35526.4 | GGAUUCCUACAGGAAGCAA | 25 | UUGCUUCCUGUAGGAAUCC | 452 |
| AD-35532.4 | GAUUCCUACAGGAAGCAAG | 26 | CUUGCUUCCUGUAGGAAUC | 453 |
| AD-35538.4 | AUUCCUACAGGAAGCAAGU | 27 | ACUUGCUUCCUGUAGGAAU | 454 |
| AD-35544.4 | UUCCUACAGGAAGCAAGUA | 28 | UACUUGCUUCCUGUAGGAA | 455 |
| AD-35550.4 | UCCUACAGGAAGCAAGUAG | 29 | CUACUUGCUUCCUGUAGGA | 456 |
| AD-35556.4 | CCUACAGGAAGCAAGUAGU | 30 | ACUACUUGCUUCCUGUAGG | 457 |
| AD-35562.4 | CUACAGGAAGCAAGUAGUA | 31 | UACUACUUGCUUCCUGUAG | 458 |
| AD-35568.4 | UACAGGAAGCAAGUAGUAA | 32 | UUACUACUUGCUUCCUGUA | 459 |
| AD-35527.4 | ACAGGAAGCAAGUAGUAAU | 33 | AUUACUACUUGCUUCCUGU | 460 |
| AD-35533.4 | CAGGAAGCAAGUAGUAAUU | 34 | AAUUACUACUUGCUUCCUG | 461 |
| AD-35539.4 | UUGGAUAUUCUCGACACAG | 35 | CUGUGUCGAGAAUAUCCAA | 462 |
| AD-35545.4 | UGGAUAUUCUCGACACAGC | 36 | GCUGUGUCGAGAAUAUCCA | 463 |
| AD-35551.4 | GGAUAUUCUCGACACAGCA | 37 | UGCUGUGUCGAGAAUAUCC | 464 |
| AD-35563.4 | AUAUUCUCGACACAGCAGG | 38 | CCUGCUGUGUCGAGAAUAU | 465 |
| AD-35528.4 | AUUCUCGACACAGCAGGUC | 39 | GACCUGCUGUGUCGAGAAU | 466 |
| AD-35540.4 | UCUCGACACAGCAGGUCAA | 40 | UUGACCUGCUGUGUCGAGA | 467 |
| AD-35546.4 | CUCGACACAGCAGGUCAAG | 41 | CUUGACCUGCUGUGUCGAG | 468 |
| AD-35552.4 | UCGACACAGCAGGUCAAGA | 42 | UCUUGACCUGCUGUGUCGA | 469 |
| AD-35558.4 | CGACACAGCAGGUCAAGAG | 43 | CUCUUGACCUGCUGUGUCG | 470 |
| AD-35564.4 | GACACAGCAGGUCAAGAGG | 44 | CCUCUUGACCUGCUGUGUC | 471 |
| AD-35570.4 | ACACAGCAGGUCAAGAGGA | 45 | UCCUCUUGACCUGCUGUGU | 472 |
| AD-35571.4 | CACAGCAGGUCAAGAGGAG | 46 | CUCCUCUUGACCUGCUGUG | 473 |
| AD-35577.4 | ACAGCAGGUCAAGAGGAGU | 47 | ACUCCUCUUGACCUGCUGU | 474 |
| AD-35583.4 | CAGCAGGUCAAGAGGAGUA | 48 | UACUCCUCUUGACCUGCUG | 475 |
| AD-35589.4 | AGCAGGUCAAGAGGAGUAC | 49 | GUACUCCUCUUGACCUGCU | 476 |
| AD-35595.4 | GCAGGUCAAGAGGAGUACA | 50 | UGUACUCCUCUUGACCUGC | 477 |
| AD-35601.4 | CAGGUCAAGAGGAGUACAG | 51 | CUGUACUCCUCUUGACCUG | 478 |
| AD-35607.4 | AGGUCAAGAGGAGUACAGU | 52 | ACUGUACUCCUCUUGACCU | 479 |
| AD-35613.4 | GGUCAAGAGGAGUACAGUG | 53 | CACUGUACUCCUCUUGACC | 480 |
| AD-35572.4 | GUCAAGAGGAGUACAGUGC | 54 | GCACUGUACUCCUCUUGAC | 481 |
| AD-35578.4 | UCAAGAGGAGUACAGUGCA | 55 | UGCACUGUACUCCUCUUGA | 482 |
| AD-35584.4 | CAAGAGGAGUACAGUGCAA | 56 | UUGCACUGUACUCCUCUUG | 483 |
| AD-35590.4 | AAGAGGAGUACAGUGCAAU | 57 | AUUGCACUGUACUCCUCUU | 484 |
| AD-35596.4 | AGAGGAGUACAGUGCAAUG | 58 | CAUUGCACUGUACUCCUCU | 485 |
| AD-35602.4 | GAGGAGUACAGUGCAAUGA | 59 | UCAUUGCACUGUACUCCUC | 486 |
| AD-35608.4 | AGGAGUACAGUGCAAUGAG | 60 | CUCAUUGCACUGUACUCCU | 487 |
| AD-35614.4 | GGAGUACAGUGCAAUGAGG | 61 | CCUCAUUGCACUGUACUCC | 488 |
| AD-35573.4 | GAGUACAGUGCAAUGAGGG | 62 | CCCUCAUUGCACUGUACUC | 489 |
| AD-35579.4 | GGGGAGGGCUUUCUUUGUG | 63 | CACAAAGAAAGCCCUCCCC | 490 |
| AD-35585.4 | GGGAGGGCUUUCUUUGUGU | 64 | ACACAAAGAAAGCCCUCCC | 491 |
| AD-35591.4 | GGAGGGCUUUCUUUGUGUA | 65 | UACACAAAGAAAGCCCUCC | 492 |
| AD-35597.4 | GAGGGCUUUCUUUGUGUAU | 66 | AUACACAAAGAAAGCCCUC | 493 |
| AD-35603.4 | AGGGCUUUCUUUGUGUAUU | 67 | AAUACACAAAGAAAGCCCU | 494 |
| AD-35609.4 | GGGCUUUCUUUGUGUAUUU | 68 | AAAUACACAAAGAAAGCCC | 495 |
| AD-35615.4 | GGCUUUCUUUGUGUAUUUG | 69 | CAAAUACACAAAGAAAGCC | 496 |
| AD-35574.4 | GCUUUCUUUGUGUAUUUGC | 70 | GCAAAUACACAAAGAAAGC | 497 |
| AD-35580.1 | CUUUCUUUGUGUAUUUGCC | 71 | GGCAAAUACACAAAGAAAG | 498 |
| AD-35586.4 | UUUCUUUGUGUAUUUGCCA | 72 | UGGCAAAUACACAAAGAAA | 499 |
| AD-35592.4 | UUCUUUGUGUAUUUGCCAU | 73 | AUGGCAAAUACACAAAGAA | 500 |
| AD-35598.4 | UCUUUGUGUAUUUGCCAUA | 74 | UAUGGCAAAUACACAAAGA | 501 |
| AD-35604.4 | CUUUGUGUAUUUGCCAUAA | 75 | UUAUGGCAAAUACACAAAG | 502 |
| AD-35610.4 | UUUGUGUAUUUGCCAUAAA | 76 | UUUAUGGCAAAUACACAAA | 503 |
| AD-35616.4 | UUGUGUAUUUGCCAUAAAU | 77 | AUUUAUGGCAAAUACACAA | 504 |
| AD-35575.4 | UGUGUAUUUGCCAUAAAUA | 78 | UAUUUAUGGCAAAUACACA | 505 |
| AD-35581.4 | GUGUAUUUGCCAUAAAUAA | 79 | UUAUUUAUGGCAAAUACAC | 506 |
| AD-35587.4 | UGUAUUUGCCAUAAAUAAU | 80 | AUUAUUUAUGGCAAAUACA | 507 |
| AD-35593.4 | GUAUUUGCCAUAAAUAAUA | 81 | UAUUAUUUAUGGCAAAUAC | 508 |
| AD-35599.4 | UAUUUGCCAUAAAUAAUAC | 82 | GUAUUAUUUAUGGCAAAUA | 509 |
| AD-35605.4 | AUUUGCCAUAAAUAAUACU | 83 | AGUAUUAUUUAUGGCAAAU | 510 |
| AD-35611.4 | UUUGCCAUAAAUAAUACUA | 84 | UAGUAUUAUUUAUGGCAAA | 511 |
| AD-35617.4 | UGAAGAUAUUCACCAUUAU | 85 | AUAAUGGUGAAUAUCUUCA | 512 |
| AD-35576.4 | GAAGAUAUUCACCAUUAUA | 86 | UAUAAUGGUGAAUAUCUUC | 513 |
| AD-35588.4 | AGAUAUUCACCAUUAUAGA | 87 | UCUAUAAUGGUGAAUAUCU | 514 |
| AD-35667.1 | AAACAUCAGCAAAGACAAG | 88 | CUUGUCUUUGCUGAUGUUU | 515 |
| AD-35673.1 | AACAUCAGCAAAGACAAGA | 89 | UCUUGUCUUUGCUGAUGUU | 516 |
| AD-35679.1 | ACAUCAGCAAAGACAAGAC | 90 | GUCUUGUCUUUGCUGAUGU | 517 |
| AD-35685.1 | CAUCAGCAAAGACAAGACA | 91 | UGUCUUGUCUUUGCUGAUG | 518 |
| AD-35691.1 | AUCAGCAAAGACAAGACAG | 92 | CUGUCUUGUCUUUGCUGAU | 519 |
| AD-35557.1 | GAUAUUCUCGACACAGCAG | 93 | CUGCUGUGUCGAGAAUAUC | 520 |
| AD-35618.1 | UUCACCAUUAUAGAGAACA | 94 | UGUUCUCUAUAAUGGUGAA | 521 |
| AD-35569.1 | UAUUCUCGACACAGCAGGU | 95 | ACCUGCUGUGUCGAGAAUA | 522 |
| AD-35534.1 | UUCUCGACACAGCAGGUCA | 96 | UGACCUGCUGUGUCGAGAA | 523 |
| AD-35582.1 | AAGAUAUUCACCAUUAUAG | 97 | CUAUAAUGGUGAAUAUCUU | 524 |
| AD-35594.1 | GAUAUUCACCAUUAUAGAG | 98 | CUCUAUAAUGGUGAAUAUC | 525 |
| AD-35600.1 | AUAUUCACCAUUAUAGAGA | 99 | UCUCUAUAAUGGUGAAUAU | 526 |
| AD-35606.1 | UAUUCACCAUUAUAGAGAA | 100 | UUCUCUAUAAUGGUGAAUA | 527 |
| AD-35612.1 | AUUCACCAUUAUAGAGAAC | 101 | GUUCUCUAUAAUGGUGAAU | 528 |
| AD-38127.1 | UCACCAUUAUAGAGAACAA | 102 | UUGUUCUCUAUAAUGGUGA | 529 |
| AD-38133.1 | CACCAUUAUAGAGAACAAA | 103 | UUUGUUCUCUAUAAUGGUG | 530 |
| AD-38139.1 | ACCAUUAUAGAGAACAAAU | 104 | AUUUGUUCUCUAUAAUGGU | 531 |
| AD-38145.1 | CCAUUAUAGAGAACAAAUU | 105 | AAUUUGUUCUCUAUAAUGG | 532 |
| AD-38151.1 | CAUUAUAGAGAACAAAUUA | 106 | UAAUUUGUUCUCUAUAAUG | 533 |
| AD-38157.1 | AUUAUAGAGAACAAAUUAA | 107 | UUAAUUUGUUCUCUAUAAU | 534 |
| AD-38163.1 | UUAUAGAGAACAAAUUAAA | 108 | UUUAAUUUGUUCUCUAUAA | 535 |
| AD-38169.1 | UAUAGAGAACAAAUUAAAA | 109 | UUUUAAUUUGUUCUCUAUA | 536 |
| AD-38128.1 | AUAGAGAACAAAUUAAAAG | 110 | CUUUUAAUUUGUUCUCUAU | 537 |
| AD-38134.1 | UAGAGAACAAAUUAAAAGA | 111 | UCUUUUAAUUUGUUCUCUA | 538 |
| AD-38140.1 | AGAGAACAAAUUAAAAGAG | 112 | CUCUUUUAAUUUGUUCUCU | 539 |
| AD-38146.1 | GAAGAUGUACCUAUGGUCC | 113 | GGACCAUAGGUACAUCUUC | 540 |
| AD-38152.1 | AAGAUGUACCUAUGGUCCU | 114 | AGGACCAUAGGUACAUCUU | 541 |
| AD-38158.1 | AGAUGUACCUAUGGUCCUA | 115 | UAGGACCAUAGGUACAUCU | 542 |
| AD-38164.1 | GAUGUACCUAUGGUCCUAG | 116 | CUAGGACCAUAGGUACAUC | 543 |
| AD-38170.1 | AUGUACCUAUGGUCCUAGU | 117 | ACUAGGACCAUAGGUACAU | 544 |
| AD-38129.1 | UGUACCUAUGGUCCUAGUA | 118 | UACUAGGACCAUAGGUACA | 545 |
| AD-38135.1 | GUACCUAUGGUCCUAGUAG | 119 | CUACUAGGACCAUAGGUAC | 546 |
| AD-38141.1 | UACCUAUGGUCCUAGUAGG | 120 | CCUACUAGGACCAUAGGUA | 547 |
| AD-38147.1 | ACCUAUGGUCCUAGUAGGA | 121 | UCCUACUAGGACCAUAGGU | 548 |
| AD-38153.1 | CCUAUGGUCCUAGUAGGAA | 122 | UUCCUACUAGGACCAUAGG | 549 |
| AD-38159.1 | CUAUGGUCCUAGUAGGAAA | 123 | UUUCCUACUAGGACCAUAG | 550 |
| AD-38165.1 | UAUGGUCCUAGUAGGAAAU | 124 | AUUUCCUACUAGGACCAUA | 551 |
| AD-38171.1 | AUGGUCCUAGUAGGAAAUA | 125 | UAUUUCCUACUAGGACCAU | 552 |
| AD-38130.1 | UGGUCCUAGUAGGAAAUAA | 126 | UUAUUUCCUACUAGGACCA | 553 |
| AD-38136.1 | GGUCCUAGUAGGAAAUAAA | 127 | UUUAUUUCCUACUAGGACC | 554 |
| AD-38142.1 | GUCCUAGUAGGAAAUAAAU | 128 | AUUUAUUUCCUACUAGGAC | 555 |
| AD-38148.1 | UCCUAGUAGGAAAUAAAUG | 129 | CAUUUAUUUCCUACUAGGA | 556 |
| AD-38154.1 | CCUAGUAGGAAAUAAAUGU | 130 | ACAUUUAUUUCCUACUAGG | 557 |
| AD-38160.1 | CUAGUAGGAAAUAAAUGUG | 131 | CACAUUUAUUUCCUACUAG | 558 |
| AD-38166.1 | UAGUAGGAAAUAAAUGUGA | 132 | UCACAUUUAUUUCCUACUA | 559 |
| AD-38172.1 | AGUAGGAAAUAAAUGUGAU | 133 | AUCACAUUUAUUUCCUACU | 560 |
| AD-38131.1 | GGAAUUCCUUUUAUUGAAA | 134 | UUUCAAUAAAAGGAAUUCC | 561 |
| AD-38137.1 | GAAUUCCUUUUAUUGAAAC | 135 | GUUUCAAUAAAAGGAAUUC | 562 |
| AD-38143.1 | AAUUCCUUUUAUUGAAACA | 136 | UGUUUCAAUAAAAGGAAUU | 563 |
| AD-38149.1 | AUUCCUUUUAUUGAAACAU | 137 | AUGUUUCAAUAAAAGGAAU | 564 |
| AD-38155.1 | UUCCUUUUAUUGAAACAUC | 138 | GAUGUUUCAAUAAAAGGAA | 565 |
| AD-38161.1 | UCCUUUUAUUGAAACAUCA | 139 | UGAUGUUUCAAUAAAAGGA | 566 |
| AD-38167.1 | CCUUUUAUUGAAACAUCAG | 140 | CUGAUGUUUCAAUAAAAGG | 567 |
| AD-38173.1 | CUUUUAUUGAAACAUCAGC | 141 | GCUGAUGUUUCAAUAAAAG | 568 |
| AD-38132.1 | UUUUAUUGAAACAUCAGCA | 142 | UGCUGAUGUUUCAAUAAAA | 569 |
| AD-38138.1 | UUUAUUGAAACAUCAGCAA | 143 | UUGCUGAUGUUUCAAUAAA | 570 |
| AD-38144.1 | UUAUUGAAACAUCAGCAAA | 144 | UUUGCUGAUGUUUCAAUAA | 571 |
| AD-38150.1 | UAUUGAAACAUCAGCAAAG | 145 | CUUUGCUGAUGUUUCAAUA | 572 |
| AD-38156.1 | AUUGAAACAUCAGCAAAGA | 146 | UCUUUGCUGAUGUUUCAAU | 573 |
| AD-38162.1 | UUGAAACAUCAGCAAAGAC | 147 | GUCUUUGCUGAUGUUUCAA | 574 |
| AD-38168.1 | UGAAACAUCAGCAAAGACA | 148 | UGUCUUUGCUGAUGUUUCA | 575 |
| AD-38174.1 | GAAACAUCAGCAAAGACAA | 149 | UUGUCUUUGCUGAUGUUUC | 576 |
| AD-39683.1 | AUGACUGAAUAUAAACUUG | 150 | CAAGUUUAUAUUCAGUCAU | 577 |
| AD-39689.1 | UGACUGAAUAUAAACUUGU | 151 | ACAAGUUUAUAUUCAGUCA | 578 |
| AD-39695.1 | GACUGAAUAUAAACUUGUG | 152 | CACAAGUUUAUAUUCAGUC | 579 |
| AD-39701.1 | ACUGAAUAUAAACUUGUGG | 153 | CCACAAGUUUAUAUUCAGU | 580 |
| AD-39707.1 | CUGAAUAUAAACUUGUGGU | 154 | ACCACAAGUUUAUAUUCAG | 581 |
| AD-39713.1 | UGAAUAUAAACUUGUGGUA | 155 | UACCACAAGUUUAUAUUCA | 582 |
| AD-39719.1 | GAAUAUAAACUUGUGGUAG | 156 | CUACCACAAGUUUAUAUUC | 583 |
| AD-39725.1 | AAUAUAAACUUGUGGUAGU | 157 | ACUACCACAAGUUUAUAUU | 584 |
| AD-39684.1 | AUAUAAACUUGUGGUAGUU | 158 | AACUACCACAAGUUUAUAU | 585 |
| AD-39690.1 | UAUAAACUUGUGGUAGUUG | 159 | CAACUACCACAAGUUUAUA | 586 |
| AD-39696.1 | AUAAACUUGUGGUAGUUGG | 160 | CCAACUACCACAAGUUUAU | 587 |
| AD-39702.1 | UAAACUUGUGGUAGUUGGA | 161 | UCCAACUACCACAAGUUUA | 588 |
| AD-39708.1 | AAACUUGUGGUAGUUGGAG | 162 | CUCCAACUACCACAAGUUU | 589 |
| AD-39714.1 | AACUUGUGGUAGUUGGAGC | 163 | GCUCCAACUACCACAAGUU | 590 |
| AD-39720.1 | ACUUGUGGUAGUUGGAGCU | 164 | AGCUCCAACUACCACAAGU | 591 |
| AD-39726.1 | CUUGUGGUAGUUGGAGCUG | 165 | CAGCUCCAACUACCACAAG | 592 |
| AD-39685.1 | UUGUGGUAGUUGGAGCUGG | 166 | CCAGCUCCAACUACCACAA | 593 |
| AD-39691.1 | UGUGGUAGUUGGAGCUGGU | 167 | ACCAGCUCCAACUACCACA | 594 |
| AD-39697.1 | GUGGUAGUUGGAGCUGGUG | 168 | CACCAGCUCCAACUACCAC | 595 |
| AD-39703.1 | UGGUAGUUGGAGCUGGUGG | 169 | CCACCAGCUCCAACUACCA | 596 |
| AD-39709.1 | GGUAGUUGGAGCUGGUGGC | 170 | GCCACCAGCUCCAACUACC | 597 |
| AD-39715.1 | GUAGUUGGAGCUGGUGGCG | 171 | CGCCACCAGCUCCAACUAC | 598 |
| AD-39721.1 | UAGUUGGAGCUGGUGGCGU | 172 | ACGCCACCAGCUCCAACUA | 599 |
| AD-39727.1 | AGUUGGAGCUGGUGGCGUA | 173 | UACGCCACCAGCUCCAACU | 600 |
| AD-39686.1 | GUUGGAGCUGGUGGCGUAG | 174 | CUACGCCACCAGCUCCAAC | 601 |
| AD-39692.1 | UUGGAGCUGGUGGCGUAGG | 175 | CCUACGCCACCAGCUCCAA | 602 |
| AD-39698.1 | UGGAGCUGGUGGCGUAGGC | 176 | GCCUACGCCACCAGCUCCA | 603 |
| AD-39704.1 | GGAGCUGGUGGCGUAGGCA | 177 | UGCCUACGCCACCAGCUCC | 604 |
| AD-39710.1 | GAGCUGGUGGCGUAGGCAA | 178 | UUGCCUACGCCACCAGCUC | 605 |
| AD-39716.1 | AGCUGGUGGCGUAGGCAAG | 179 | CUUGCCUACGCCACCAGCU | 606 |
| AD-39722.1 | GCUGGUGGCGUAGGCAAGA | 180 | UCUUGCCUACGCCACCAGC | 607 |
| AD-39728.1 | CUGGUGGCGUAGGCAAGAG | 181 | CUCUUGCCUACGCCACCAG | 608 |
| AD-39687.1 | UGGUGGCGUAGGCAAGAGU | 182 | ACUCUUGCCUACGCCACCA | 609 |
| AD-39693.1 | GGUGGCGUAGGCAAGAGUG | 183 | CACUCUUGCCUACGCCACC | 610 |
| AD-39699.1 | GUGGCGUAGGCAAGAGUGC | 184 | GCACUCUUGCCUACGCCAC | 611 |
| AD-39705.1 | UGGCGUAGGCAAGAGUGCC | 185 | GGCACUCUUGCCUACGCCA | 612 |
| AD-39711.1 | GGCGUAGGCAAGAGUGCCU | 186 | AGGCACUCUUGCCUACGCC | 613 |
| AD-39717.1 | GCGUAGGCAAGAGUGCCUU | 187 | AAGGCACUCUUGCCUACGC | 614 |
| AD-39723.1 | CGUAGGCAAGAGUGCCUUG | 188 | CAAGGCACUCUUGCCUACG | 615 |
| AD-39729.1 | GUAGGCAAGAGUGCCUUGA | 189 | UCAAGGCACUCUUGCCUAC | 616 |
| AD-39688.1 | UAGGCAAGAGUGCCUUGAC | 190 | GUCAAGGCACUCUUGCCUA | 617 |
| AD-39694.1 | AGGCAAGAGUGCCUUGACG | 191 | CGUCAAGGCACUCUUGCCU | 618 |
| AD-39700.1 | GGCAAGAGUGCCUUGACGA | 192 | UCGUCAAGGCACUCUUGCC | 619 |
| AD-39706.1 | GCAAGAGUGCCUUGACGAU | 193 | AUCGUCAAGGCACUCUUGC | 620 |
| AD-39712.1 | CAAGAGUGCCUUGACGAUA | 194 | UAUCGUCAAGGCACUCUUG | 621 |
| AD-39718.1 | AAGAGUGCCUUGACGAUAC | 195 | GUAUCGUCAAGGCACUCUU | 622 |
| AD-39724.1 | AGAGUGCCUUGACGAUACA | 196 | UGUAUCGUCAAGGCACUCU | 623 |
| AD-39730.1 | GAGUGCCUUGACGAUACAG | 197 | CUGUAUCGUCAAGGCACUC | 624 |
| AD-39736.1 | AGUGCCUUGACGAUACAGC | 198 | GCUGUAUCGUCAAGGCACU | 625 |
| AD-39742.1 | GUGCCUUGACGAUACAGCU | 199 | AGCUGUAUCGUCAAGGCAC | 626 |
| AD-39748.1 | UGCCUUGACGAUACAGCUA | 200 | UAGCUGUAUCGUCAAGGCA | 627 |
| AD-39754.1 | GCCUUGACGAUACAGCUAA | 201 | UUAGCUGUAUCGUCAAGGC | 628 |
| AD-39760.1 | CCUUGACGAUACAGCUAAU | 202 | AUUAGCUGUAUCGUCAAGG | 629 |
| AD-39766.1 | CUUGACGAUACAGCUAAUU | 203 | AAUUAGCUGUAUCGUCAAG | 630 |
| AD-39772.1 | UUGACGAUACAGCUAAUUC | 204 | GAAUUAGCUGUAUCGUCAA | 631 |
| AD-39731.1 | UGACGAUACAGCUAAUUCA | 205 | UGAAUUAGCUGUAUCGUCA | 632 |
| AD-39737.1 | GACGAUACAGCUAAUUCAG | 206 | CUGAAUUAGCUGUAUCGUC | 633 |
| AD-39743.1 | ACGAUACAGCUAAUUCAGA | 207 | UCUGAAUUAGCUGUAUCGU | 634 |
| AD-39749.1 | CGAUACAGCUAAUUCAGAA | 208 | UUCUGAAUUAGCUGUAUCG | 635 |
| AD-39755.1 | GAUACAGCUAAUUCAGAAU | 209 | AUUCUGAAUUAGCUGUAUC | 636 |
| AD-39761.1 | AUACAGCUAAUUCAGAAUC | 210 | GAUUCUGAAUUAGCUGUAU | 637 |
| AD-39767.1 | UACAGCUAAUUCAGAAUCA | 211 | UGAUUCUGAAUUAGCUGUA | 638 |
| AD-39773.1 | ACAGCUAAUUCAGAAUCAU | 212 | AUGAUUCUGAAUUAGCUGU | 639 |
| AD-39732.1 | CAGCUAAUUCAGAAUCAUU | 213 | AAUGAUUCUGAAUUAGCUG | 640 |
| AD-39738.1 | AGCUAAUUCAGAAUCAUUU | 214 | AAAUGAUUCUGAAUUAGCU | 641 |
| AD-39744.1 | GCUAAUUCAGAAUCAUUUU | 215 | AAAAUGAUUCUGAAUUAGC | 642 |
| AD-39750.1 | CUAAUUCAGAAUCAUUUUG | 216 | CAAAAUGAUUCUGAAUUAG | 643 |
| AD-39756.1 | UAAUUCAGAAUCAUUUUGU | 217 | ACAAAAUGAUUCUGAAUUA | 644 |
| AD-39762.1 | AAUUCAGAAUCAUUUUGUG | 218 | CACAAAAUGAUUCUGAAUU | 645 |
| AD-39768.1 | AUUCAGAAUCAUUUUGUGG | 219 | CCACAAAAUGAUUCUGAAU | 646 |
| AD-39774.1 | UUCAGAAUCAUUUUGUGGA | 220 | UCCACAAAAUGAUUCUGAA | 647 |
| AD-39733.1 | UCAGAAUCAUUUUGUGGAC | 221 | GUCCACAAAAUGAUUCUGA | 648 |
| AD-39739.1 | CAGAAUCAUUUUGUGGACG | 222 | CGUCCACAAAAUGAUUCUG | 649 |
| AD-39745.1 | AGAAUCAUUUUGUGGACGA | 223 | UCGUCCACAAAAUGAUUCU | 650 |
| AD-39751.1 | GAAUCAUUUUGUGGACGAA | 224 | UUCGUCCACAAAAUGAUUC | 651 |
| AD-39757.1 | AAUCAUUUUGUGGACGAAU | 225 | AUUCGUCCACAAAAUGAUU | 652 |
| AD-39763.1 | AUCAUUUUGUGGACGAAUA | 226 | UAUUCGUCCACAAAAUGAU | 653 |
| AD-39769.1 | UCAUUUUGUGGACGAAUAU | 227 | AUAUUCGUCCACAAAAUGA | 654 |
| AD-39775.1 | CAUUUUGUGGACGAAUAUG | 228 | CAUAUUCGUCCACAAAAUG | 655 |
| AD-39734.1 | AUUUUGUGGACGAAUAUGA | 229 | UCAUAUUCGUCCACAAAAU | 656 |
| AD-39740.1 | UUUUGUGGACGAAUAUGAU | 230 | AUCAUAUUCGUCCACAAAA | 657 |
| AD-39746.1 | UUUGUGGACGAAUAUGAUC | 231 | GAUCAUAUUCGUCCACAAA | 658 |
| AD-39752.1 | UUGUGGACGAAUAUGAUCC | 232 | GGAUCAUAUUCGUCCACAA | 659 |
| AD-39758.1 | UGUGGACGAAUAUGAUCCA | 233 | UGGAUCAUAUUCGUCCACA | 660 |
| AD-39764.1 | GUGGACGAAUAUGAUCCAA | 234 | UUGGAUCAUAUUCGUCCAC | 661 |
| AD-39770.1 | UGGACGAAUAUGAUCCAAC | 235 | GUUGGAUCAUAUUCGUCCA | 662 |
| AD-39776.1 | AGGAAGCAAGUAGUAAUUG | 236 | CAAUUACUACUUGCUUCCU | 663 |
| AD-39735.1 | GGAAGCAAGUAGUAAUUGA | 237 | UCAAUUACUACUUGCUUCC | 664 |
| AD-39741.1 | GAAGCAAGUAGUAAUUGAU | 238 | AUCAAUUACUACUUGCUUC | 665 |
| AD-39747.1 | AAGCAAGUAGUAAUUGAUG | 239 | CAUCAAUUACUACUUGCUU | 666 |
| AD-39753.1 | AGCAAGUAGUAAUUGAUGG | 240 | CCAUCAAUUACUACUUGCU | 667 |
| AD-39759.1 | GCAAGUAGUAAUUGAUGGA | 241 | UCCAUCAAUUACUACUUGC | 668 |
| AD-39765.1 | CAAGUAGUAAUUGAUGGAG | 242 | CUCCAUCAAUUACUACUUG | 669 |
| AD-39771.1 | AAGUAGUAAUUGAUGGAGA | 243 | UCUCCAUCAAUUACUACUU | 670 |
| AD-39778.1 | AGUAGUAAUUGAUGGAGAA | 244 | UUCUCCAUCAAUUACUACU | 671 |
| AD-39784.1 | GUAGUAAUUGAUGGAGAAA | 245 | UUUCUCCAUCAAUUACUAC | 672 |
| AD-39790.1 | UAGUAAUUGAUGGAGAAAC | 246 | GUUUCUCCAUCAAUUACUA | 673 |
| AD-39796.1 | AGUAAUUGAUGGAGAAACC | 247 | GGUUUCUCCAUCAAUUACU | 674 |
| AD-39802.1 | GUAAUUGAUGGAGAAACCU | 248 | AGGUUUCUCCAUCAAUUAC | 675 |
| AD-39808.1 | UAAUUGAUGGAGAAACCUG | 249 | CAGGUUUCUCCAUCAAUUA | 676 |
| AD-39814.1 | AAUUGAUGGAGAAACCUGU | 250 | ACAGGUUUCUCCAUCAAUU | 677 |
| AD-39820.1 | AUUGAUGGAGAAACCUGUC | 251 | GACAGGUUUCUCCAUCAAU | 678 |
| AD-39779.1 | UUGAUGGAGAAACCUGUCU | 252 | AGACAGGUUUCUCCAUCAA | 679 |
| AD-39785.1 | UGAUGGAGAAACCUGUCUC | 253 | GAGACAGGUUUCUCCAUCA | 680 |
| AD-39791.1 | GAUGGAGAAACCUGUCUCU | 254 | AGAGACAGGUUUCUCCAUC | 681 |
| AD-39797.1 | AUGGAGAAACCUGUCUCUU | 255 | AAGAGACAGGUUUCUCCAU | 682 |
| AD-39803.1 | UGGAGAAACCUGUCUCUUG | 256 | CAAGAGACAGGUUUCUCCA | 683 |
| AD-39809.1 | GGAGAAACCUGUCUCUUGG | 257 | CCAAGAGACAGGUUUCUCC | 684 |
| AD-39815.1 | GAGAAACCUGUCUCUUGGA | 258 | UCCAAGAGACAGGUUUCUC | 685 |
| AD-39821.1 | AGAAACCUGUCUCUUGGAU | 259 | AUCCAAGAGACAGGUUUCU | 686 |
| AD-39780.1 | GAAACCUGUCUCUUGGAUA | 260 | UAUCCAAGAGACAGGUUUC | 687 |
| AD-39786.1 | AAACCUGUCUCUUGGAUAU | 261 | AUAUCCAAGAGACAGGUUU | 688 |
| AD-39792.1 | AACCUGUCUCUUGGAUAUU | 262 | AAUAUCCAAGAGACAGGUU | 689 |
| AD-39798.1 | ACCUGUCUCUUGGAUAUUC | 263 | GAAUAUCCAAGAGACAGGU | 690 |
| AD-39804.1 | CCUGUCUCUUGGAUAUUCU | 264 | AGAAUAUCCAAGAGACAGG | 691 |
| AD-39810.1 | CUGUCUCUUGGAUAUUCUC | 265 | GAGAAUAUCCAAGAGACAG | 692 |
| AD-39816.1 | UGUCUCUUGGAUAUUCUCG | 266 | CGAGAAUAUCCAAGAGACA | 693 |
| AD-39822.1 | GUCUCUUGGAUAUUCUCGA | 267 | UCGAGAAUAUCCAAGAGAC | 694 |
| AD-39781.1 | UCUCUUGGAUAUUCUCGAC | 268 | GUCGAGAAUAUCCAAGAGA | 695 |
| AD-39787.1 | CUCUUGGAUAUUCUCGACA | 269 | UGUCGAGAAUAUCCAAGAG | 696 |
| AD-39793.1 | UCUUGGAUAUUCUCGACAC | 270 | GUGUCGAGAAUAUCCAAGA | 697 |
| AD-39799.1 | CUUGGAUAUUCUCGACACA | 271 | UGUGUCGAGAAUAUCCAAG | 698 |
| AD-39805.1 | AGUACAGUGCAAUGAGGGA | 272 | UCCCUCAUUGCACUGUACU | 699 |
| AD-39811.1 | GUACAGUGCAAUGAGGGAC | 273 | GUCCCUCAUUGCACUGUAC | 700 |
| AD-39817.1 | UACAGUGCAAUGAGGGACC | 274 | GGUCCCUCAUUGCACUGUA | 701 |
| AD-39823.1 | ACAGUGCAAUGAGGGACCA | 275 | UGGUCCCUCAUUGCACUGU | 702 |
| AD-39782.1 | CAGUGCAAUGAGGGACCAG | 276 | CUGGUCCCUCAUUGCACUG | 703 |
| AD-39788.1 | AGUGCAAUGAGGGACCAGU | 277 | ACUGGUCCCUCAUUGCACU | 704 |
| AD-39794.1 | GUGCAAUGAGGGACCAGUA | 278 | UACUGGUCCCUCAUUGCAC | 705 |
| AD-39800.1 | UGCAAUGAGGGACCAGUAC | 279 | GUACUGGUCCCUCAUUGCA | 706 |
| AD-39806.1 | GCAAUGAGGGACCAGUACA | 280 | UGUACUGGUCCCUCAUUGC | 707 |
| AD-39812.1 | CAAUGAGGGACCAGUACAU | 281 | AUGUACUGGUCCCUCAUUG | 708 |
| AD-39818.1 | AAUGAGGGACCAGUACAUG | 282 | CAUGUACUGGUCCCUCAUU | 709 |
| AD-39824.1 | AUGAGGGACCAGUACAUGA | 283 | UCAUGUACUGGUCCCUCAU | 710 |
| AD-39783.1 | UGAGGGACCAGUACAUGAG | 284 | CUCAUGUACUGGUCCCUCA | 711 |
| AD-39789.1 | GAGGGACCAGUACAUGAGG | 285 | CCUCAUGUACUGGUCCCUC | 712 |
| AD-39795.1 | AGGGACCAGUACAUGAGGA | 286 | UCCUCAUGUACUGGUCCCU | 713 |
| AD-39801.1 | GGGACCAGUACAUGAGGAC | 287 | GUCCUCAUGUACUGGUCCC | 714 |
| AD-39807.1 | GGACCAGUACAUGAGGACU | 288 | AGUCCUCAUGUACUGGUCC | 715 |
| AD-39813.1 | GACCAGUACAUGAGGACUG | 289 | CAGUCCUCAUGUACUGGUC | 716 |
| AD-39819.1 | ACCAGUACAUGAGGACUGG | 290 | CCAGUCCUCAUGUACUGGU | 717 |
| AD-39825.1 | CCAGUACAUGAGGACUGGG | 291 | CCCAGUCCUCAUGUACUGG | 718 |
| AD-39831.1 | CAGUACAUGAGGACUGGGG | 292 | CCCCAGUCCUCAUGUACUG | 719 |
| AD-39837.1 | AGUACAUGAGGACUGGGGA | 293 | UCCCCAGUCCUCAUGUACU | 720 |
| AD-39843.1 | GUACAUGAGGACUGGGGAG | 294 | CUCCCCAGUCCUCAUGUAC | 721 |
| AD-39849.1 | UACAUGAGGACUGGGGAGG | 295 | CCUCCCCAGUCCUCAUGUA | 722 |
| AD-39855.1 | ACAUGAGGACUGGGGAGGG | 296 | CCCUCCCCAGUCCUCAUGU | 723 |
| AD-39861.1 | CAUGAGGACUGGGGAGGGC | 297 | GCCCUCCCCAGUCCUCAUG | 724 |
| AD-39867.1 | AUGAGGACUGGGGAGGGCU | 298 | AGCCCUCCCCAGUCCUCAU | 725 |
| AD-39826.1 | UGAGGACUGGGGAGGGCUU | 299 | AAGCCCUCCCCAGUCCUCA | 726 |
| AD-39832.1 | GAGGACUGGGGAGGGCUUU | 300 | AAAGCCCUCCCCAGUCCUC | 727 |
| AD-39838.1 | AGGACUGGGGAGGGCUUUC | 301 | GAAAGCCCUCCCCAGUCCU | 728 |
| AD-39844.1 | GGACUGGGGAGGGCUUUCU | 302 | AGAAAGCCCUCCCCAGUCC | 729 |
| AD-39850.1 | GACUGGGGAGGGCUUUCUU | 303 | AAGAAAGCCCUCCCCAGUC | 730 |
| AD-39856.1 | ACUGGGGAGGGCUUUCUUU | 304 | AAAGAAAGCCCUCCCCAGU | 731 |
| AD-39862.1 | CUGGGGAGGGCUUUCUUUG | 305 | CAAAGAAAGCCCUCCCCAG | 732 |
| AD-39868.1 | UGGGGAGGGCUUUCUUUGU | 306 | ACAAAGAAAGCCCUCCCCA | 733 |
| AD-39827.1 | UUGCCAUAAAUAAUACUAA | 307 | UUAGUAUUAUUUAUGGCAA | 734 |
| AD-39833.1 | UGCCAUAAAUAAUACUAAA | 308 | UUUAGUAUUAUUUAUGGCA | 735 |
| AD-39839.1 | GCCAUAAAUAAUACUAAAU | 309 | AUUUAGUAUUAUUUAUGGC | 736 |
| AD-39845.1 | CCAUAAAUAAUACUAAAUC | 310 | GAUUUAGUAUUAUUUAUGG | 737 |
| AD-39851.1 | CAUAAAUAAUACUAAAUCA | 311 | UGAUUUAGUAUUAUUUAUG | 738 |
| AD-39857.1 | AUAAAUAAUACUAAAUCAU | 312 | AUGAUUUAGUAUUAUUUAU | 739 |
| AD-39863.1 | UAAAUAAUACUAAAUCAUU | 313 | AAUGAUUUAGUAUUAUUUA | 740 |
| AD-39869.1 | AAAUAAUACUAAAUCAUUU | 314 | AAAUGAUUUAGUAUUAUUU | 741 |
| AD-39828.1 | AAUAAUACUAAAUCAUUUG | 315 | CAAAUGAUUUAGUAUUAUU | 742 |
| AD-39834.1 | AUAAUACUAAAUCAUUUGA | 316 | UCAAAUGAUUUAGUAUUAU | 743 |
| AD-39840.1 | UAAUACUAAAUCAUUUGAA | 317 | UUCAAAUGAUUUAGUAUUA | 744 |
| AD-39846.1 | AAUACUAAAUCAUUUGAAG | 318 | CUUCAAAUGAUUUAGUAUU | 745 |
| AD-39852.1 | AUACUAAAUCAUUUGAAGA | 319 | UCUUCAAAUGAUUUAGUAU | 746 |
| AD-39858.1 | UACUAAAUCAUUUGAAGAU | 320 | AUCUUCAAAUGAUUUAGUA | 747 |
| AD-39864.1 | ACUAAAUCAUUUGAAGAUA | 321 | UAUCUUCAAAUGAUUUAGU | 748 |
| AD-39870.1 | CUAAAUCAUUUGAAGAUAU | 322 | AUAUCUUCAAAUGAUUUAG | 749 |
| AD-39829.1 | UAAAUCAUUUGAAGAUAUU | 323 | AAUAUCUUCAAAUGAUUUA | 750 |
| AD-39835.1 | AAAUCAUUUGAAGAUAUUC | 324 | GAAUAUCUUCAAAUGAUUU | 751 |
| AD-39841.1 | AAUCAUUUGAAGAUAUUCA | 325 | UGAAUAUCUUCAAAUGAUU | 752 |
| AD-39853.1 | UCAUUUGAAGAUAUUCACC | 326 | GGUGAAUAUCUUCAAAUGA | 753 |
| AD-39859.1 | CAUUUGAAGAUAUUCACCA | 327 | UGGUGAAUAUCUUCAAAUG | 754 |
| AD-39865.1 | AUUUGAAGAUAUUCACCAU | 328 | AUGGUGAAUAUCUUCAAAU | 755 |
| AD-39871.1 | UUUGAAGAUAUUCACCAUU | 329 | AAUGGUGAAUAUCUUCAAA | 756 |
| AD-39830.1 | UUGAAGAUAUUCACCAUUA | 330 | UAAUGGUGAAUAUCUUCAA | 757 |
| AD-39836.1 | GAGAACAAAUUAAAAGAGU | 331 | ACUCUUUUAAUUUGUUCUC | 758 |
| AD-39842.1 | AGAACAAAUUAAAAGAGUU | 332 | AACUCUUUUAAUUUGUUCU | 759 |
| AD-39848.1 | GAACAAAUUAAAAGAGUUA | 333 | UAACUCUUUUAAUUUGUUC | 760 |
| AD-39854.1 | AACAAAUUAAAAGAGUUAA | 334 | UUAACUCUUUUAAUUUGUU | 761 |
| AD-39860.1 | ACAAAUUAAAAGAGUUAAG | 335 | CUUAACUCUUUUAAUUUGU | 762 |
| AD-39866.1 | CAAAUUAAAAGAGUUAAGG | 336 | CCUUAACUCUUUUAAUUUG | 763 |
| AD-39992.1 | AAAUUAAAAGAGUUAAGGA | 337 | UCCUUAACUCUUUUAAUUU | 764 |
| AD-39998.1 | AAUUAAAAGAGUUAAGGAC | 338 | GUCCUUAACUCUUUUAAUU | 765 |
| AD-40004.1 | AUUAAAAGAGUUAAGGACU | 339 | AGUCCUUAACUCUUUUAAU | 766 |
| AD-40010.1 | UUAAAAGAGUUAAGGACUC | 340 | GAGUCCUUAACUCUUUUAA | 767 |
| AD-40016.1 | UAAAAGAGUUAAGGACUCU | 341 | AGAGUCCUUAACUCUUUUA | 768 |
| AD-40022.1 | AAAAGAGUUAAGGACUCUG | 342 | CAGAGUCCUUAACUCUUUU | 769 |
| AD-40028.1 | AAAGAGUUAAGGACUCUGA | 343 | UCAGAGUCCUUAACUCUUU | 770 |
| AD-40034.1 | AAGAGUUAAGGACUCUGAA | 344 | UUCAGAGUCCUUAACUCUU | 771 |
| AD-39999.1 | GAGUUAAGGACUCUGAAGA | 345 | UCUUCAGAGUCCUUAACUC | 772 |
| AD-40005.1 | AGUUAAGGACUCUGAAGAU | 346 | AUCUUCAGAGUCCUUAACU | 773 |
| AD-40011.1 | GUUAAGGACUCUGAAGAUG | 347 | CAUCUUCAGAGUCCUUAAC | 774 |
| AD-40017.1 | UUAAGGACUCUGAAGAUGU | 348 | ACAUCUUCAGAGUCCUUAA | 775 |
| AD-40029.1 | AAGGACUCUGAAGAUGUAC | 349 | GUACAUCUUCAGAGUCCUU | 776 |
| AD-40035.1 | AGGACUCUGAAGAUGUACC | 350 | GGUACAUCUUCAGAGUCCU | 777 |
| AD-39994.1 | GGACUCUGAAGAUGUACCU | 351 | AGGUACAUCUUCAGAGUCC | 778 |
| AD-40000.1 | GACUCUGAAGAUGUACCUA | 352 | UAGGUACAUCUUCAGAGUC | 779 |
| AD-40006.1 | ACUCUGAAGAUGUACCUAU | 353 | AUAGGUACAUCUUCAGAGU | 780 |
| AD-40012.1 | CUCUGAAGAUGUACCUAUG | 354 | CAUAGGUACAUCUUCAGAG | 781 |
| AD-40018.1 | UCUGAAGAUGUACCUAUGG | 355 | CCAUAGGUACAUCUUCAGA | 782 |
| AD-40024.1 | CUGAAGAUGUACCUAUGGU | 356 | ACCAUAGGUACAUCUUCAG | 783 |
| AD-40030.1 | UGAAGAUGUACCUAUGGUC | 357 | GACCAUAGGUACAUCUUCA | 784 |
| AD-40036.1 | GUAGGAAAUAAAUGUGAUU | 358 | AAUCACAUUUAUUUCCUAC | 785 |
| AD-39995.1 | UAGGAAAUAAAUGUGAUUU | 359 | AAAUCACAUUUAUUUCCUA | 786 |
| AD-40001.1 | AGGAAAUAAAUGUGAUUUG | 360 | CAAAUCACAUUUAUUUCCU | 787 |
| AD-40007.1 | GGAAAUAAAUGUGAUUUGC | 361 | GCAAAUCACAUUUAUUUCC | 788 |
| AD-40013.1 | GAAAUAAAUGUGAUUUGCC | 362 | GGCAAAUCACAUUUAUUUC | 789 |
| AD-40019.1 | AAAUAAAUGUGAUUUGCCU | 363 | AGGCAAAUCACAUUUAUUU | 790 |
| AD-40025.1 | AAUAAAUGUGAUUUGCCUU | 364 | AAGGCAAAUCACAUUUAUU | 791 |
| AD-40031.1 | AUAAAUGUGAUUUGCCUUC | 365 | GAAGGCAAAUCACAUUUAU | 792 |
| AD-40037.1 | UAAAUGUGAUUUGCCUUCU | 366 | AGAAGGCAAAUCACAUUUA | 793 |
| AD-39996.1 | AAAUGUGAUUUGCCUUCUA | 367 | UAGAAGGCAAAUCACAUUU | 794 |
| AD-40002.1 | AAUGUGAUUUGCCUUCUAG | 368 | CUAGAAGGCAAAUCACAUU | 795 |
| AD-40008.1 | AUGUGAUUUGCCUUCUAGA | 369 | UCUAGAAGGCAAAUCACAU | 796 |
| AD-40014.1 | UGUGAUUUGCCUUCUAGAA | 370 | UUCUAGAAGGCAAAUCACA | 797 |
| AD-40020.1 | GUGAUUUGCCUUCUAGAAC | 371 | GUUCUAGAAGGCAAAUCAC | 798 |
| AD-40026.1 | UGAUUUGCCUUCUAGAACA | 372 | UGUUCUAGAAGGCAAAUCA | 799 |
| AD-40032.1 | GAUUUGCCUUCUAGAACAG | 373 | CUGUUCUAGAAGGCAAAUC | 800 |
| AD-40038.1 | AUUUGCCUUCUAGAACAGU | 374 | ACUGUUCUAGAAGGCAAAU | 801 |
| AD-39997.1 | UUUGCCUUCUAGAACAGUA | 375 | UACUGUUCUAGAAGGCAAA | 802 |
| AD-40009.1 | UGCCUUCUAGAACAGUAGA | 376 | UCUACUGUUCUAGAAGGCA | 803 |
| AD-40015.1 | GCCUUCUAGAACAGUAGAC | 377 | GUCUACUGUUCUAGAAGGC | 804 |
| AD-40021.1 | CCUUCUAGAACAGUAGACA | 378 | UGUCUACUGUUCUAGAAGG | 805 |
| AD-40027.1 | CUUCUAGAACAGUAGACAC | 379 | GUGUCUACUGUUCUAGAAG | 806 |
| AD-40033.1 | UUCUAGAACAGUAGACACA | 380 | UGUGUCUACUGUUCUAGAA | 807 |
| AD-40039.1 | UCUAGAACAGUAGACACAA | 381 | UUGUGUCUACUGUUCUAGA | 808 |
| AD-40045.1 | CUAGAACAGUAGACACAAA | 382 | UUUGUGUCUACUGUUCUAG | 809 |
| AD-40051.1 | UAGAACAGUAGACACAAAA | 383 | UUUUGUGUCUACUGUUCUA | 810 |
| AD-40057.1 | AGAACAGUAGACACAAAAC | 384 | GUUUUGUGUCUACUGUUCU | 811 |
| AD-40063.1 | GAACAGUAGACACAAAACA | 385 | UGUUUUGUGUCUACUGUUC | 812 |
| AD-40069.1 | AACAGUAGACACAAAACAG | 386 | CUGUUUUGUGUCUACUGUU | 813 |
| AD-40075.1 | ACAGUAGACACAAAACAGG | 387 | CCUGUUUUGUGUCUACUGU | 814 |
| AD-40081.1 | CAGUAGACACAAAACAGGC | 388 | GCCUGUUUUGUGUCUACUG | 815 |
| AD-40040.1 | AGUAGACACAAAACAGGCU | 389 | AGCCUGUUUUGUGUCUACU | 816 |
| AD-40046.1 | GUAGACACAAAACAGGCUC | 390 | GAGCCUGUUUUGUGUCUAC | 817 |
| AD-40052.1 | UAGACACAAAACAGGCUCA | 391 | UGAGCCUGUUUUGUGUCUA | 818 |
| AD-40058.1 | AGACACAAAACAGGCUCAG | 392 | CUGAGCCUGUUUUGUGUCU | 819 |
| AD-40064.1 | GACACAAAACAGGCUCAGG | 393 | CCUGAGCCUGUUUUGUGUC | 820 |
| AD-40070.1 | ACACAAAACAGGCUCAGGA | 394 | UCCUGAGCCUGUUUUGUGU | 821 |
| AD-40076.1 | CACAAAACAGGCUCAGGAC | 395 | GUCCUGAGCCUGUUUUGUG | 822 |
| AD-40082.1 | ACAAAACAGGCUCAGGACU | 396 | AGUCCUGAGCCUGUUUUGU | 823 |
| AD-40041.1 | CAAAACAGGCUCAGGACUU | 397 | AAGUCCUGAGCCUGUUUUG | 824 |
| AD-40047.1 | AAAACAGGCUCAGGACUUA | 398 | UAAGUCCUGAGCCUGUUUU | 825 |
| AD-40053.1 | AAACAGGCUCAGGACUUAG | 399 | CUAAGUCCUGAGCCUGUUU | 826 |
| AD-40059.1 | AACAGGCUCAGGACUUAGC | 400 | GCUAAGUCCUGAGCCUGUU | 827 |
| AD-40065.1 | ACAGGCUCAGGACUUAGCA | 401 | UGCUAAGUCCUGAGCCUGU | 828 |
| AD-40071.1 | CAGGCUCAGGACUUAGCAA | 402 | UUGCUAAGUCCUGAGCCUG | 829 |
| AD-40077.1 | AGGCUCAGGACUUAGCAAG | 403 | CUUGCUAAGUCCUGAGCCU | 830 |
| AD-40083.1 | GGCUCAGGACUUAGCAAGA | 404 | UCUUGCUAAGUCCUGAGCC | 831 |
| AD-40042.1 | GCUCAGGACUUAGCAAGAA | 405 | UUCUUGCUAAGUCCUGAGC | 832 |
| AD-40048.1 | CUCAGGACUUAGCAAGAAG | 406 | CUUCUUGCUAAGUCCUGAG | 833 |
| AD-40054.1 | UCAGGACUUAGCAAGAAGU | 407 | ACUUCUUGCUAAGUCCUGA | 834 |
| AD-40060.1 | CAGGACUUAGCAAGAAGUU | 408 | AACUUCUUGCUAAGUCCUG | 835 |
| AD-40066.1 | AGGACUUAGCAAGAAGUUA | 409 | UAACUUCUUGCUAAGUCCU | 836 |
| AD-40072.1 | GGACUUAGCAAGAAGUUAU | 410 | AUAACUUCUUGCUAAGUCC | 837 |
| AD-40078.1 | GACUUAGCAAGAAGUUAUG | 411 | CAUAACUUCUUGCUAAGUC | 838 |
| AD-40084.1 | ACUUAGCAAGAAGUUAUGG | 412 | CCAUAACUUCUUGCUAAGU | 839 |
| AD-40043.1 | CUUAGCAAGAAGUUAUGGA | 413 | UCCAUAACUUCUUGCUAAG | 840 |
| AD-40049.1 | UUAGCAAGAAGUUAUGGAA | 414 | UUCCAUAACUUCUUGCUAA | 841 |
| AD-40055.1 | UAGCAAGAAGUUAUGGAAU | 415 | AUUCCAUAACUUCUUGCUA | 842 |
| AD-40061.1 | AGCAAGAAGUUAUGGAAUU | 416 | AAUUCCAUAACUUCUUGCU | 843 |
| AD-40067.1 | GCAAGAAGUUAUGGAAUUC | 417 | GAAUUCCAUAACUUCUUGC | 844 |
| AD-40073.1 | CAAGAAGUUAUGGAAUUCC | 418 | GGAAUUCCAUAACUUCUUG | 845 |
| AD-40079.1 | AAGAAGUUAUGGAAUUCCU | 419 | AGGAAUUCCAUAACUUCUU | 846 |
| AD-40085.1 | AGAAGUUAUGGAAUUCCUU | 420 | AAGGAAUUCCAUAACUUCU | 847 |
| AD-40044.1 | GAAGUUAUGGAAUUCCUUU | 421 | AAAGGAAUUCCAUAACUUC | 848 |
| AD-40050.1 | AAGUUAUGGAAUUCCUUUU | 422 | AAAAGGAAUUCCAUAACUU | 849 |
| AD-40056.1 | AGUUAUGGAAUUCCUUUUA | 423 | UAAAAGGAAUUCCAUAACU | 850 |
| AD-40062.1 | GUUAUGGAAUUCCUUUUAU | 424 | AUAAAAGGAAUUCCAUAAC | 851 |
| AD-40068.1 | UUAUGGAAUUCCUUUUAUU | 425 | AAUAAAAGGAAUUCCAUAA | 852 |
| AD-40074.1 | UAUGGAAUUCCUUUUAUUG | 426 | CAAUAAAAGGAAUUCCAUA | 853 |
| AD-40080.1 | AUGGAAUUCCUUUUAUUGA | 427 | UCAAUAAAAGGAAUUCCAU | 854 |
| AD-39720.1 | ACTTGTGGTAGTTGGAGCT | 1716 | AGCTCCAACTACCACAAGT | 1754 |
| AD-39706.1 | GCAAGAGTGCCTTGACGAT | 1717 | ATCGTCAAGGCACTCTTGC | 1755 |
| AD-39712.1 | CAAGAGTGCCTTGACGATA | 1718 | TATCGTCAAGGCACTCTTG | 1756 |
| AD-39760.1 | CCTTGACGATACAGCTAAT | 1719 | ATTAGCTGTATCGTCAAGG | 1757 |
| AD-39732.1 | CAGCTAATTCAGAATCATT | 1720 | AATGATTCTGAATTAGCTG | 1758 |
| AD-35541.4 | CGAATATGATCCAACAATA | 1721 | TATTGTTGGATCATATTCG | 1759 |
| AD-39735.1 | GGAAGCAAGTAGTAATTGA | 1722 | TCAATTACTACTTGCTTCC | 1760 |
| or hs_KRAS_321_A22S26 | | | | |
| AD-39741.1 | GAAGCAAGTAGTAATTGAT | 1723 | ATCAATTACTACTTGCTTC | 1761 |
| or | | | | |
| hs_KRAS_322_A22S26 | | | | |
| AD-39778.1 | AGTAGTAATTGATGGAGAA | 1724 | TTCTCCATCAATTACTACT | 1762 |
| AD-39790.1 | TAGTAATTGATGGAGAAAC | 1725 | GTTTCTCCATCAATTACTA | 1763 |
| AD-39822.1 | GTCTCTTGGATATTCTCGA | 1726 | TCGAGAATATCCAAGAGAC | 1764 |
| AD-35609.4 | GGGCTTTCTTTGTGTATTT | 1727 | AAATACACAAAGAAAGCCC | 1765 |
| AD-35581.4 | GTGTATTTGCCATAAATAA | 1728 | TTATTTATGGCAAATACAC | 1766 |
| AD-39845.1 | CCATAAATAATACTAAATC | 1729 | GATTTAGTATTATTTATGG | 1767 |
| AD-39858.1 | TACTAAATCATTTGAAGAT | 1730 | ATCTTCAAATGATTTAGTA | 1768 |
| AD-39870.1 | CTAAATCATTTGAAGATAT | 1731 | ATATCTTCAAATGATTTAG | 1769 |
| AD-35576.4 | GAAGATATTCACCATTATA | 1732 | TATAATGGTGAATATCTTC | 1770 |
| AD-35588.4 | AGATATTCACCATTATAGA | 1733 | TCTATAATGGTGAATATCT | 1771 |
| AD-35600.1 | ATATTCACCATTATAGAGA | 1734 | TCTCTATAATGGTGAATAT | 1772 |
| AD-35606.1 | TATTCACCATTATAGAGAA | 1735 | TTCTCTATAATGGTGAATA | 1773 |
| AD-38151.1 | CATTATAGAGAACAAATTA | 1736 | TAATTTGTTCTCTATAATG | 1774 |
| AD-38163.1 | TTATAGAGAACAAATTAAA | 1737 | TTTAATTTGTTCTCTATAA | 1775 |
| AD-39999.1 | GAGTTAAGGACTCTGAAGA | 1738 | TCTTCAGAGTCCTTAACTC | 1776 |
| AD-38159.1 | CTATGGTCCTAGTAGGAAA | 1739 | TTTCCTACTAGGACCATAG | 1777 |
| or hs_KRAS_528_A22S26 | | | | |
| AD-38130.1 | TGGTCCTAGTAGGAAATAA | 1740 | TTATTTCCTACTAGGACCA | 1778 |
| or hs_KRAS_531_A22S26 | | | | |
| AD-38136.1 | GGTCCTAGTAGGAAATAAA | 1741 | TTTATTTCCTACTAGGACC | 1779 |
| AD-40036.1 | GTAGGAAATAAATGTGATT | 1742 | AATCACATTTATTTCCTAC | 1780 |
| AD-40008.1 | ATGTGATTTGCCTTCTAGA | 1743 | TCTAGAAGGCAAATCACAT | 1781 |
| AD-40021.1 | CCTTCTAGAACAGTAGACA | 1744 | TGTCTACTGTTCTAGAAGG | 1782 |
| AD-40077.1 | AGGCTCAGGACTTAGCAAG | 1745 | CTTGCTAAGTCCTGAGCCT | 1783 |
| AD-40072.1 | GGACTTAGCAAGAAGTTAT | 1746 | ATAACTTCTTGCTAAGTCC | 1784 |
| AD-40061.1 | AGCAAGAAGTTATGGAATT | 1747 | AATTCCATAACTTCTTGCT | 1785 |
| AD-40068.1 | TTATGGAATTCCTTTTATT | 1748 | AATAAAAGGAATTCCATAA | 1786 |
| AD-38131.1 | GGAATTCCTTTTATTGAAA | 1749 | TTTCAATAAAAGGAATTCC | 1787 |
| AD-38167.1 | CCTTTTATTGAAACATCAG | 1750 | CTGATGTTTCAATAAAAGG | 1788 |
| hs_KRAS | CCTGATGAATGTAAAGTTA | 1751 | TAACTTTACATTCATCAGG | 1789 |
| 1273_A22S26 | | | | |
| hs_KRAS | GGAGAATTTAATAAAGATA | 1752 | TATCTTTATTAAATTCTCC | 1790 |
| 2892_A37S26 | | | | |
| hs_KRAS | GAATAGTCATAACTAGATT | 1753 | AATCTAGTTATGACTATTC | 1791 |
| 4731_A22S26 | | | | |

TABLE 3
KRAS duplexes with modified sequences

| | | Seq | | Seq |
|---|---|---|---|---|
| | | SEQ | | SEQ |
| | Sense | ID | | ID |
| Duplex | Sequence | NO: | Anti sense Sequence | NO: |
| AD-35523.3 | GGAcGAAuAuGAuccAAcAdTdT | 855 | UGUUGGAUcAuAUUCGUCCdTdT | 1282 |
| AD-35529.1 | GAcGAAuAuGAuccAAcAAdTdT | 856 | UUGUUGGAUcAuAUUCGUCdTdT | 1283 |
| AD-35535.4 | AcGAAuAuGAuccAAcAAudTdT | 857 | AUUGUUGGAUcAuAUUCGUdTdT | 1284 |
| AD-35541.4 | cGAAuAuGAuccAAcAAuAdTdT | 858 | uAUUGUUGGAUcAuAUUCGdTdT | 1285 |
| AD-35547.4 | GAAuAuGAuccAAcAAuAGdTdT | 859 | CuAUUGUUGGAUcAuAUUCdTdT | 1286 |
| AD-35553.4 | AAuAuGAuccAAcAAuAGAdTdT | 860 | UCuAUUGUUGGAUcAuAUUdTdT | 1287 |
| AD-35559.4 | AuAuGAuccAAcAAuAGAGdTdT | 861 | CUCuAUUGUUGGAUcAuAUdTdT | 1288 |
| AD-35565.4 | uAuGAuccAAcAAuAGAGGdTdT | 862 | CCUCuAUUGUUGGAUcAuAdTdT | 1289 |
| AD-35524.4 | AuGAuccAAcAAuAGAGGAdTdT | 863 | UCCUCuAUUGUUGGAUcAUdTdT | 1290 |
| AD-35530.4 | uGAuccAAcAAuAGAGGAudTdT | 864 | AUCCUCuAUUGUUGGAUcAdTdT | 1291 |
| AD-35536.4 | GAuccAAcAAuAGAGGAuudTdT | 865 | AAUCCUCuAUUGUUGGAUCdTdT | 1292 |
| AD-35542.4 | AuccAAcAAuAGAGGAuucdTdT | 866 | GAAUCCUCuAUUGUUGGAUdTdT | 1293 |
| AD-35548.4 | uccAAcAAuAGAGGAuuccdTdT | 867 | GGAAUCCUCuAUUGUUGGAdTdT | 1294 |
| AD-35554.4 | ccAAcAAuAGAGGAuuccudTdT | 868 | AGGAAUCCUCuAUUGUUGGdTdT | 1295 |
| AD-35560.2 | cAAcAAuAGAGGAuuccuAdTdT | 869 | uAGGAAUCCUCuAUUGUUGdTdT | 1296 |
| AD-35566.4 | AAcAAuAGAGGAuuccuAcdTdT | 870 | GuAGGAAUCCUCuAUUGUUdTdT | 1297 |
| AD-35525.2 | AcAAuAGAGGAuuccuAcAdTdT | 871 | UGuAGGAAUCCUCuAUUGUdTdT | 1298 |
| AD-35531.4 | cAAuAGAGGAuuccuAcAGdTdT | 872 | CUGuAGGAAUCCUCuAUUGdTdT | 1299 |
| AD-35537.4 | AAuAGAGGAuuccuAcAGGdTdT | 873 | CCUGuAGGAAUCCUCuAUUdTdT | 1300 |
| AD-35543.2 | AuAGAGGAuuccuAcAGGAdTdT | 874 | UCCUGuAGGAAUCCUCuAUdTdT | 1301 |
| AD-35549.4 | uAGAGGAuuccuAcAGGAAdTdT | 875 | UUCCUGuAGGAAUCCUCuAdTdT | 1302 |
| AD-35555.4 | AGAGGAuuccuAcAGGAAGdTdT | 876 | CUUCCUGuAGGAAUCCUCUdTdT | 1303 |
| AD-35561.4 | GAGGAuuccuAcAGGAAGcdTdT | 877 | GCUUCCUGuAGGAAUCCUCdTdT | 1304 |
| AD-35567.4 | AGGAuuccuAcAGGAAGcAdTdT | 878 | UGCUUCCUGuAGGAAUCCUdTdT | 1305 |
| AD-35526.4 | GGAuuccuAcAGGAAGcAAdTdT | 879 | UUGCUUCCUGuAGGAAUCCdTdT | 1306 |
| AD-35532.4 | GAuuccuAcAGGAAGcAAGdTdT | 880 | CUUGCUUCCUGuAGGAAUCdTdT | 1307 |
| AD-35538.4 | AuuccuAcAGGAAGcAAGudTdT | 881 | ACUUGCUUCCUGuAGGAAUdTdT | 1308 |
| AD-35544.4 | uuccuAcAGGAAGcAAGuAdTdT | 882 | uACUUGCUUCCUGuAGGAAdTdT | 1309 |
| AD-35550.4 | uccuAcAGGAAGcAAGuAGdTdT | 883 | CuACUUGCUUCCUGuAGGAdTdT | 1310 |
| AD-35556.4 | ccuAcAGGAAGcAAGuAGudTdT | 884 | ACuACUUGCUUCCUGuAGGdTdT | 1311 |
| AD-35562.4 | cuAcAGGAAGcAAGuAGuAdTdT | 885 | uACuACUUGCUUCCUGuAGdTdT | 1312 |
| AD-35568.4 | uAcAGGAAGcAAGuAGuAAdTdT | 886 | UuACuACUUGCUUCCUGuAdTdT | 1313 |
| AD-35527.4 | AcAGGAAGcAAGuAGuAAudTdT | 887 | AUuACuACUUGCUUCCUGUdTdT | 1314 |
| AD-35533.4 | cAGGAAGcAAGuAGuAAuudTdT | 888 | AAUuACuACUUGCUUCCUGdTdT | 1315 |
| AD-35539.4 | uuGGAuAuucucGAcAcAGdTdT | 889 | CUGUGUCGAGAAuAUCcAAdTdT | 1316 |
| AD-35545.4 | uGGAuAuucucGAcAcAGcdTdT | 890 | GCUGUGUCGAGAAuAUCcAdTdT | 1317 |
| AD-35551.4 | GGAuAuucucGAcAcAGcAdTdT | 891 | UGCUGUGUCGAGAAuAUCCdTdT | 1318 |
| AD-35563.4 | AuAuucucGAcAcAGcAGGdTdT | 892 | CCUGCUGUGUCGAGAAuAUdTdT | 1319 |
| AD-35528.4 | AuucucGAcAcAGcAGGucdTdT | 893 | GACCUGCUGUGUCGAGAAUdTdT | 1320 |
| AD-35540.4 | ucucGAcAcAGcAGGucAAdTdT | 894 | UUGACCUGCUGUGUCGAGAdTdT | 1321 |
| AD-35546.4 | cucGAcAcAGcAGGucAAGdTdT | 895 | CUUGACCUGCUGUGUCGAGdTdT | 1322 |
| AD-35552.4 | ucGAcAcAGcAGGucAAGAdTdT | 896 | UCUUGACCUGCUGUGUCGAdTdT | 1323 |
| AD-35558.4 | cGAcAcAGcAGGucAAGAGdTdT | 897 | CUCUUGACCUGCUGUGUCGdTdT | 1324 |
| AD-35564.4 | GAcAcAGcAGGucAAGAGGdTdT | 898 | CCUCUUGACCUGCUGUGUCdTdT | 1325 |
| AD-35570.4 | AcAcAGcAGGucAAGAGGAdTdT | 899 | UCCUCUUGACCUGCUGUGUdTdT | 1326 |
| AD-35571.4 | cAcAGcAGGucAAGAGGAGdTdT | 900 | CUCCUCUUGACCUGCUGUGdTdT | 1327 |
| AD-35577.4 | AcAGcAGGucAAGAGGAGudTdT | 901 | ACUCCUCUUGACCUGCUGUdTdT | 1328 |
| AD-35583.4 | cAGcAGGucAAGAGGAGuAdTdT | 902 | uACUCCUCUUGACCUGCUGdTdT | 1329 |
| AD-35589.4 | AGcAGGucAAGAGGAGuAcdTdT | 903 | GuACUCCUCUUGACCUGCUdTdT | 1330 |
| AD-35595.4 | GcAGGucAAGAGGAGuAcAdTdT | 904 | UGuACUCCUCUUGACCUGCdTdT | 1331 |
| AD-35601.4 | cAGGucAAGAGGAGuAcAGdTdT | 905 | CUGuACUCCUCUUGACCUGdTdT | 1332 |
| AD-35607.4 | AGGucAAGAGGAGuAcAGudTdT | 906 | ACUGuACUCCUCUUGACCUdTdT | 1333 |
| AD-35613.4 | GGucAAGAGGAGuAcAGuGdTdT | 907 | cACUGuACUCCUCUUGACCdTdT | 1334 |
| AD-35572.4 | GucAAGAGGAGuAcAGuGcdTdT | 908 | GcACUGuACUCCUCUUGACdTdT | 1335 |
| AD-35578.4 | ucAAGAGGAGuAcAGuGcAdTdT | 909 | UGcACUGuACUCCUCUUGAdTdT | 1336 |
| AD-35584.4 | cAAGAGGAGuAcAGuGcAAdTdT | 910 | UUGcACUGuACUCCUCUUGdTdT | 1337 |
| AD-35590.4 | AAGAGGAGuAcAGuGcAAudTdT | 911 | AUUGcACUGuACUCCUCUUdTdT | 1338 |
| AD-35596.4 | AGAGGAGuAcAGuGcAAuGdTdT | 912 | cAUUGcACUGuACUCCUCUdTdT | 1339 |
| AD-35602.4 | GAGGAGuAcAGuGcAAuGAdTdT | 913 | UcAUUGcACUGuACUCCUCdTdT | 1340 |
| AD-35608.4 | AGGAGuAcAGuGcAAuGAGdTdT | 914 | CUcAUUGcACUGuACUCCUdTdT | 1341 |
| AD-35614.4 | GGAGuAcAGuGcAAuGAGGdTdT | 915 | CCUcAUUGcACUGuACUCCdTdT | 1342 |
| AD-35573.4 | GAGuAcAGuGcAAuGAGGGdTdT | 916 | CCCUcAUUGcACUGuACUCdTdT | 1343 |
| AD-35579.4 | GGGGAGGGcuuucuuuGuGdTdT | 917 | cAcAAAGAAAGCCCUCCCCdTdT | 1344 |
| AD-35585.4 | GGGAGGGcuuucuuuGuGudTdT | 918 | AcAcAAAGAAAGCCCUCCCdTdT | 1345 |
| AD-35591.4 | GGAGGGcuuucuuuGuGuAdTdT | 919 | uAcAcAAAGAAAGCCCUCCdTdT | 1346 |
| AD-35597.4 | GAGGGcuuucuuuGuGuAudTdT | 920 | AuAcAcAAAGAAAGCCCUCdTdT | 1347 |
| AD-35603.4 | AGGGcuuucuuuGuGuAuudTdT | 921 | AAuAcAcAAAGAAAGCCCUdTdT | 1348 |
| AD-35609.4 | GGGcuuucuuuGuGuAuuudTdT | 922 | AAAuAcAcAAAGAAAGCCCdTdT | 1349 |
| AD-35615.4 | GGcuuucuuuGuGuAuuuGdTdT | 923 | cAAAuAcAcAAAGAAAGCCdTdT | 1350 |
| AD-35574.4 | GcuuucuuuGuGuAuuuGcdTdT | 924 | GcAAAuAcAcAAAGAAAGCdTdT | 1351 |
| AD-35580.1 | cuuucuuuGuGuAuuuGccdTdT | 925 | GGcAAAuAcAcAAAGAAAGdTdT | 1352 |
| AD-35586.4 | uuucuuuGuGuAuuuGccAdTdT | 926 | UGGcAAAuAcAcAAAGAAAdTdT | 1353 |
| AD-35592.4 | uucuuuGuGuAuuuGccAudTdT | 927 | AUGGcAAAuAcAcAAAGAAdTdT | 1354 |
| AD-35598.4 | ucuuuGuGuAuuuGccAuAdTdT | 928 | uAUGGcAAAuAcAcAAAGAdTdT | 1355 |
| AD-35604.4 | cuuuGuGuAuuuGccAuAAdTdT | 929 | UuAUGGcAAAuAcAcAAAGdTdT | 1356 |
| AD-35610.4 | uuuGuGuAuuuGccAuAAAdTdT | 930 | UUuAUGGcAAAuAcAcAAAdTdT | 1357 |
| AD-35616.4 | uuGuGuAuuuGccAuAAAudTdT | 931 | AUUuAUGGcAAAuAcAcAAdTdT | 1358 |
| AD-35575.4 | uGuGuAuuuGccAuAAAuAdTdT | 932 | uAUUuAUGGcAAAuAcAcAdTdT | 1359 |
| AD-35581.4 | GuGuAuuuGccAuAAAuAAdTdT | 933 | UuAUUuAUGGcAAAuAcACdTdT | 1360 |
| AD-35587.4 | uGuAuuuGccAuAAAuAAudTdT | 934 | AUuAUUuAUGGcAAAuAcAdTdT | 1361 |
| AD-35593.4 | GuAuuuGccAuAAAuAAuAdTdT | 935 | uAUuAUUuAUGGcAAAuACdTdT | 1362 |
| AD-35599.4 | uAuuuGccAuAAAuAAuAcdTdT | 936 | GuAUuAUUuAUGGcAAAuAdTdT | 1363 |
| AD-35605.4 | AuuuGccAuAAAuAAuAcudTdT | 937 | AGuAUuAUUuAUGGcAAAUdTdT | 1364 |
| AD-35611.4 | uuuGccAuAAAuAAuAcuAdTdT | 938 | uAGuAUuAUUuAUGGcAAAdTdT | 1365 |
| AD-35617.4 | uGAAGAuAuucAccAuuAudTdT | 939 | AuAAUGGUGAAuAUCUUcAdTdT | 1366 |
| AD-35576.4 | GAAGAuAuucAccAuuAuAdTdT | 940 | uAuAAUGGUGAAuAUCUUCdTdT | 1367 |
| AD-35588.4 | AGAuAuucAccAuuAuAGAdTdT | 941 | UCuAuAAUGGUGAAuAUCUdTdT | 1368 |
| AD-35667.1 | AAAcAucAGcAAAGAcAAGdTdT | 942 | CUUGUCUUUGCUGAUGUUUdTdT | 1369 |
| AD-35673.1 | AAcAucAGcAAAGAcAAGAdTdT | 943 | UCUUGUCUUUGCUGAUGUUdTdT | 1370 |
| AD-35679.1 | AcAucAGcAAAGAcAAGAcdTdT | 944 | GUCUUGUCUUUGCUGAUGUdTdT | 1371 |
| AD-35685.1 | cAucAGcAAAGAcAAGAcAdTdT | 945 | UGUCUUGUCUUUGCUGAUGdTdT | 1372 |
| AD-35691.1 | AucAGcAAAGAcAAGAcAGdTdT | 946 | CUGUCUUGUCUUUGCUGAUdTdT | 1373 |
| AD-35557.1 | GAuAuucucGAcAcAGcAGdTdT | 947 | CUGCUGUGUCGAGAAuAUCdTdT | 1374 |
| AD-35618.1 | uucAccAuuAuAGAGAAcAdTdT | 948 | UGUUCUCuAuAAUGGUGAAdTdT | 1375 |
| AD-35569.1 | uAuucucGAcAcAGcAGGudTdT | 949 | ACCUGCUGUGUCGAGAAuAdTdT | 1376 |
| AD-35534.1 | uucucGAcAcAGcAGGucAdTdT | 950 | UGACCUGCUGUGUCGAGAAdTdT | 1377 |
| AD-35582.1 | AAGAuAuucAccAuuAuAGdTdT | 951 | CuAuAAUGGUGAAuAUCUUdTdT | 1378 |
| AD-35594.1 | GAuAuucAccAuuAuAGAGdTdT | 952 | CUCuAuAAUGGUGAAuAUCdTdT | 1379 |
| AD-35600.1 | AuAuucAccAuuAuAGAGAdTdT | 953 | UCUCuAuAAUGGUGAAuAUdTdT | 1380 |
| AD-35606.1 | uAuucAccAuuAuAGAGAAdTdT | 954 | UUCUCuAuAAUGGUGAAuAdTdT | 1381 |
| AD-35612.1 | AuucAccAuuAuAGAGAAcdTdT | 955 | GUUCUCuAuAAUGGUGAAUdTdT | 1382 |
| AD-38127.1 | ucAccAuuAuAGAGAAcAAdTdT | 956 | UUGUUCUCuAuAAUGGUGAdTdT | 1383 |
| AD-38133.1 | cAccAuuAuAGAGAAcAAAdTdT | 957 | UUUGUUCUCuAuAAUGGUGdTdT | 1384 |
| AD-38139.1 | AccAuuAuAGAGAAcAAAudTdT | 958 | AUUUGUUCUCuAuAAUGGUdTdT | 1385 |
| AD-38145.1 | ccAuuAuAGAGAAcAAAuudTdT | 959 | AAUUUGUUCUCuAuAAUGGdTdT | 1386 |
| AD-38151.1 | cAuuAuAGAGAAcAAAuuAdTdT | 960 | uAAUUUGUUCUCuAuAAUGdTdT | 1387 |
| AD-38157.1 | AuuAuAGAGAAcAAAuuAAdTdT | 961 | UuAAUUUGUUCUCuAuAAUdTdT | 1388 |
| AD-38163.1 | uuAuAGAGAAcAAAuuAAAdTdT | 962 | UUuAAUUUGUUCUCuAuAAdTdT | 1389 |
| AD-38169.1 | uAuAGAGAAcAAAuuAAAAdTdT | 963 | UUUuAAUUUGUUCUCuAuAdTdT | 1390 |
| AD-38128.1 | AuAGAGAAcAAAuuAAAAGdTdT | 964 | CUUUuAAUUUGUUCUCuAUdTdT | 1391 |
| AD-38134.1 | uAGAGAAcAAAuuAAAAGAdTdT | 965 | UCUUUuAAUUUGUUCUCuAdTdT | 1392 |
| AD-38140.1 | AGAGAAcAAAuuAAAAGAGdTdT | 966 | CUCUUUuAAUUUGUUCUCUdTdT | 1393 |
| AD-38146.1 | GAAGAuGuAccuAuGGuccdTdT | 967 | GGACcAuAGGuAcAUCUUCdTdT | 1394 |
| AD-38152.1 | AAGAuGuAccuAuGGuccudTdT | 968 | AGGACcAuAGGuAcAUCUUdTdT | 1395 |
| AD-38158.1 | AGAuGuAccuAuGGuccuAdTdT | 969 | uAGGACcAuAGGuAcAUCUdTdT | 1396 |
| AD-38164.1 | GAuGuAccuAuGGuccuAGdTdT | 970 | CuAGGACcAuAGGuAcAUCdTdT | 1397 |
| AD-38170.1 | AuGuAccuAuGGuccuAGudTdT | 971 | ACuAGGACcAuAGGuAcAUdTdT | 1398 |
| AD-38129.1 | uGuAccuAuGGuccuAGuAdTdT | 972 | uACuAGGACcAuAGGuAcAdTdT | 1399 |
| AD-38135.1 | GuAccuAuGGuccuAGuAGdTdT | 973 | CuACuAGGACcAuAGGuACdTdT | 1400 |
| AD-38141.1 | uAccuAuGGuccuAGuAGGdTdT | 974 | CCuACuAGGACcAuAGGuAdTdT | 1401 |
| AD-38147.1 | AccuAuGGuccuAGuAGGAdTdT | 975 | UCCuACuAGGACcAuAGGUdTdT | 1402 |
| AD-38153.1 | ccuAuGGuccuAGuAGGAAdTdT | 976 | UUCCuACuAGGACcAuAGGdTdT | 1403 |
| AD-38159.1 | cuAuGGuccuAGuAGGAAAdTdT | 977 | UUUCCuACuAGGACcAuAGdTdT | 1404 |
| AD-38165.1 | uAuGGuccuAGuAGGAAAudTdT | 978 | AUUUCCuACuAGGACcAuAdTdT | 1405 |
| AD-38171.1 | AuGGuccuAGuAGGAAAuAdTdT | 979 | uAUUUCCuACuAGGACcAUdTdT | 1406 |
| AD-38130.1 | uGGuccuAGuAGGAAAuAAdTdT | 980 | UuAUUUCCuACuAGGACcAdTdT | 1407 |
| AD-38136.1 | GGuccuAGuAGGAAAuAAAdTdT | 981 | UUuAUUUCCuACuAGGACCdTdT | 1408 |
| AD-38142.1 | GuccuAGuAGGAAAuAAAudTdT | 982 | AUUuAUUUCCuACuAGGACdTdT | 1409 |
| AD-38148.1 | uccuAGuAGGAAAuAAAuGdTdT | 983 | cAUUuAUUUCCuACuAGGAdTdT | 1410 |
| AD-38154.1 | ccuAGuAGGAAAuAAAuGudTdT | 984 | AcAUUuAUUUCCuACuAGGdTdT | 1411 |
| AD-38160.1 | cuAGuAGGAAAuAAAuGuGdTdT | 985 | cAcAUUuAUUUCCuACuAGdTdT | 1412 |
| AD-38166.1 | uAGuAGGAAAuAAAuGuGAdTdT | 986 | UcAcAUUuAUUUCCuACuAdTdT | 1413 |
| AD-38172.1 | AGuAGGAAAuAAAuGuGAudTdT | 987 | AUcAcAUUuAUUUCCuACUdTdT | 1414 |
| AD-38131.1 | GGAAuuccuuuuAuuGAAAdTdT | 988 | UUUcAAuAAAAGGAAUUCCdTdT | 1415 |
| AD-38137.1 | GAAuuccuuuuAuuGAAAcdTdT | 989 | GUUUcAAuAAAAGGAAUUCdTdT | 1416 |
| AD-38143.1 | AAuuccuuuuAuuGAAAcAdTdT | 990 | UGUUUcAAuAAAAGGAAUUdTdT | 1417 |
| AD-38149.1 | AuuccuuuuAuuGAAAcAudTdT | 991 | AUGUUUcAAuAAAAGGAAUdTdT | 1418 |
| AD-38155.1 | uuccuuuuAuuGAAAcAucdTdT | 992 | GAUGUUUcAAuAAAAGGAAdTdT | 1419 |
| AD-38161.1 | uccuuuuAuuGAAAcAucAdTdT | 993 | UGAUGUUUcAAuAAAAGGAdTdT | 1420 |
| AD-38167.1 | ccuuuuAuuGAAAcAucAGdTdT | 994 | CUGAUGUUUcAAuAAAAGGdTdT | 1421 |
| AD-38173.1 | cuuuuAuuGAAAcAucAGcdTdT | 995 | GCUGAUGUUUcAAuAAAAGdTdT | 1422 |
| AD-38132.1 | uuuuAuuGAAAcAucAGcAdTdT | 996 | UGCUGAUGUUUcAAuAAAAdTdT | 1423 |
| AD-38138.1 | uuuAuuGAAAcAucAGcAAdTdT | 997 | UUGCUGAUGUUUcAAuAAAdTdT | 1424 |
| AD-38144.1 | uuAuuGAAAcAucAGcAAAdTdT | 998 | UUUGCUGAUGUUUcAAuAAdTdT | 1425 |
| AD-38150.1 | uAuuGAAAcAucAGcAAAGdTdT | 999 | CUUUGCUGAUGUUUcAAuAdTdT | 1426 |
| AD-38156.1 | AuuGAAAcAucAGcAAAGAdTdT | 1000 | UCUUUGCUGAUGUUUcAAUdTdT | 1427 |
| AD-38162.1 | uuGAAAcAucAGcAAAGAcdTdT | 1001 | GUCUUUGCUGAUGUUUcAAdTdT | 1428 |
| AD-38168.1 | uGAAAcAucAGcAAAGAcAdTdT | 1002 | UGUCUUUGCUGAUGUUUcAdTdT | 1429 |
| AD-38174.1 | GAAAcAucAGcAAAGAcAAdTdT | 1003 | UUGUCUUUGCUGAUGUUUCdTdT | 1430 |
| AD-39683.1 | AuGAcuGAAuAuAAAcuuGdTdT | 1004 | cAAGUUuAuAUUcAGUcAUdTdT | 1431 |
| AD-39689.1 | uGAcuGAAuAuAAAcuuGudTdT | 1005 | AcAAGUUuAuAUUcAGUcAdTdT | 1432 |
| AD-39695.1 | GAcuGAAuAuAAAcuuGuGdTdT | 1006 | cAcAAGUUuAuAUUcAGUCdTdT | 1433 |
| AD-39701.1 | AcuGAAuAuAAAcuuGuGGdTdT | 1007 | CcAcAAGUUuAuAUUcAGUdTdT | 1434 |
| AD-39707.1 | cuGAAuAuAAAcuuGuGGudTdT | 1008 | ACcAcAAGUUuAuAUUcAGdTdT | 1435 |
| AD-39713.1 | uGAAuAuAAAcuuGuGGuAdTdT | 1009 | uACcAcAAGUUuAuAUUcAdTdT | 1436 |
| AD-39719.1 | GAAuAuAAAcuuGuGGuAGdTdT | 1010 | CuACcAcAAGUUuAuAUUCdTdT | 1437 |
| AD-39725.1 | AAuAuAAAcuuGuGGuAGudTdT | 1011 | ACuACcAcAAGUUuAuAUUdTdT | 1438 |
| AD-39684.1 | AuAuAAAcuuGuGGuAGuudTdT | 1012 | AACuACcAcAAGUUuAuAUdTdT | 1439 |
| AD-39690.1 | uAuAAAcuuGuGGuAGuuGdTdT | 1013 | cAACuACcAcAAGUUuAuAdTdT | 1440 |
| AD-39696.1 | AuAAAcuuGuGGuAGuuGGdTdT | 1014 | CcAACuACcAcAAGUUuAUdTdT | 1441 |
| AD-39702.1 | uAAAcuuGuGGuAGuuGGAdTdT | 1015 | UCcAACuACcAcAAGUUuAdTdT | 1442 |
| AD-39708.1 | AAAcuuGuGGuAGuuGGAGdTdT | 1016 | CUCcAACuACcAcAAGUUUdTdT | 1443 |
| AD-39714.1 | AAcuuGuGGuAGuuGGAGcdTdT | 1017 | GCUCcAACuACcAcAAGUUdTdT | 1444 |
| AD-39720.1 | AcuuGuGGuAGuuGGAGcudTdT | 1018 | AGCUCcAACuACcAcAAGUdTdT | 1445 |
| AD-39726.1 | cuuGuGGuAGuuGGAGcuGdTdT | 1019 | cAGCUCcAACuACcAcAAGdTdT | 1446 |
| AD-39685.1 | uuGuGGuAGuuGGAGcuGGdTdT | 1020 | CcAGCUCcAACuACcAcAAdTdT | 1447 |
| AD-39691.1 | uGuGGuAGuuGGAGcuGGudTdT | 1021 | ACcAGCUCcAACuACcAcAdTdT | 1448 |
| AD-39697.1 | GuGGuAGuuGGAGcuGGuGdTdT | 1022 | cACcAGCUCcAACuACcACdTdT | 1449 |
| AD-39703.1 | uGGuAGuuGGAGcuGGuGGdTdT | 1023 | CcACcAGCUCcAACuACcAdTdT | 1450 |
| AD-39709.1 | GGuAGuuGGAGcuGGuGGcdTdT | 1024 | GCcACcAGCUCcAACuACCdTdT | 1451 |
| AD-39715.1 | GuAGuuGGAGcuGGuGGcGdTdT | 1025 | CGCcACcAGCUCcAACuACdTdT | 1452 |
| AD-39721.1 | uAGuuGGAGcuGGuGGcGudTdT | 1026 | ACGCcACcAGCUCcAACuAdTdT | 1453 |
| AD-39727.1 | AGuuGGAGcuGGuGGcGuAdTdT | 1027 | uACGCcACcAGCUCcAACUdTdT | 1454 |
| AD-39686.1 | GuuGGAGcuGGuGGcGuAGdTdT | 1028 | CuACGCcACcAGCUCcAACdTdT | 1455 |
| AD-39692.1 | uuGGAGcuGGuGGcGuAGGdTdT | 1029 | CCuACGCcACcAGCUCcAAdTdT | 1456 |
| AD-39698.1 | uGGAGcuGGuGGcGuAGGcdTdT | 1030 | GCCuACGCcACcAGCUCcAdTdT | 1457 |
| AD-39704.1 | GGAGcuGGuGGcGuAGGcAdTdT | 1031 | UGCCuACGCcACcAGCUCCdTdT | 1458 |
| AD-39710.1 | GAGcuGGuGGcGuAGGcAAdTdT | 1032 | UUGCCuACGCcACcAGCUCdTdT | 1459 |
| AD-39716.1 | AGcuGGuGGcGuAGGcAAGdTdT | 1033 | CUUGCCuACGCcACcAGCUdTdT | 1460 |
| AD-39722.1 | GcuGGuGGcGuAGGcAAGAdTdT | 1034 | UCUUGCCuACGCcACcAGCdTdT | 1461 |
| AD-39728.1 | cuGGuGGcGuAGGcAAGAGdTdT | 1035 | CUCUUGCCuACGCcACcAGdTdT | 1462 |
| AD-39687.1 | uGGuGGcGuAGGcAAGAGudTdT | 1036 | ACUCUUGCCuACGCcACcAdTdT | 1463 |
| AD-39693.1 | GGuGGcGuAGGcAAGAGuGdTdT | 1037 | cACUCUUGCCuACGCcACCdTdT | 1464 |
| AD-39699.1 | GuGGcGuAGGcAAGAGuGcdTdT | 1038 | GcACUCUUGCCuACGCcACdTdT | 1465 |
| AD-39705.1 | uGGcGuAGGcAAGAGuGccdTdT | 1039 | GGcACUCUUGCCuACGCcAdTdT | 1466 |
| AD-39711.1 | GGcGuAGGcAAGAGuGccudTdT | 1040 | AGGcACUCUUGCCuACGCCdTdT | 1467 |
| AD-39717.1 | GcGuAGGcAAGAGuGccuudTdT | 1041 | AAGGcACUCUUGCCuACGCdTdT | 1468 |
| AD-39723.1 | cGuAGGcAAGAGuGccuuGdTdT | 1042 | cAAGGcACUCUUGCCuACGdTdT | 1469 |
| AD-39729.1 | GuAGGcAAGAGuGccuuGAdTdT | 1043 | UcAAGGcACUCUUGCCuACdTdT | 1470 |
| AD-39688.1 | uAGGcAAGAGuGccuuGAcdTdT | 1044 | GUcAAGGcACUCUUGCCuAdTdT | 1471 |
| AD-39694.1 | AGGcAAGAGuGccuuGAcGdTdT | 1045 | CGUcAAGGcACUCUUGCCUdTdT | 1472 |
| AD-39700.1 | GGcAAGAGuGccuuGAcGAdTdT | 1046 | UCGUcAAGGcACUCUUGCCdTdT | 1473 |
| AD-39706.1 | GcAAGAGuGccuuGAcGAudTdT | 1047 | AUCGUcAAGGcACUCUUGCdTdT | 1474 |
| AD-39712.1 | cAAGAGuGccuuGAcGAuAdTdT | 1048 | uAUCGUcAAGGcACUCUUGdTdT | 1475 |
| AD-39718.1 | AAGAGuGccuuGAcGAuAcdTdT | 1049 | GuAUCGUcAAGGcACUCUUdTdT | 1476 |
| AD-39724.1 | AGAGuGccuuGAcGAuAcAdTdT | 1050 | UGuAUCGUcAAGGcACUCUdTdT | 1477 |
| AD-39730.1 | GAGuGccuuGAcGAuAcAGdTdT | 1051 | CUGuAUCGUcAAGGcACUCdTdT | 1478 |
| AD-39736.1 | AGuGccuuGAcGAuAcAGcdTdT | 1052 | GCUGuAUCGUcAAGGcACUdTdT | 1479 |
| AD-39742.1 | GuGccuuGAcGAuAcAGcudTdT | 1053 | AGCUGuAUCGUcAAGGcACdTdT | 1480 |
| AD-39748.1 | uGccuuGAcGAuAcAGcuAdTdT | 1054 | uAGCUGuAUCGUcAAGGcAdTdT | 1481 |
| AD-39754.1 | GccuuGAcGAuAcAGcuAAdTdT | 1055 | UuAGCUGuAUCGUcAAGGCdTdT | 1482 |
| AD-39760.1 | ccuuGAcGAuAcAGcuAAudTdT | 1056 | AUuAGCUGuAUCGUcAAGGdTdT | 1483 |
| AD-39766.1 | cuuGAcGAuAcAGcuAAuudTdT | 1057 | AAUuAGCUGuAUCGUcAAGdTdT | 1484 |
| AD-39772.1 | uuGAcGAuAcAGcuAAuucdTdT | 1058 | GAAUuAGCUGuAUCGUcAAdTdT | 1485 |
| AD-39731.1 | uGAcGAuAcAGcuAAuucAdTdT | 1059 | UGAAUuAGCUGuAUCGUcAdTdT | 1486 |
| AD-39737.1 | GAcGAuAcAGcuAAuucAGdTdT | 1060 | CUGAAUuAGCUGuAUCGUCdTdT | 1487 |
| AD-39743.1 | AcGAuAcAGcuAAuucAGAdTdT | 1061 | UCUGAAUuAGCUGuAUCGUdTdT | 1488 |
| AD-39749.1 | cGAuAcAGcuAAuucAGAAdTdT | 1062 | UUCUGAAUuAGCUGuAUCGdTdT | 1489 |
| AD-39755.1 | GAuAcAGcuAAuucAGAAudTdT | 1063 | AUUCUGAAUuAGCUGuAUCdTdT | 1490 |
| AD-39761.1 | AuAcAGcuAAuucAGAAucdTdT | 1064 | GAUUCUGAAUuAGCUGuAUdTdT | 1491 |
| AD-39767.1 | uAcAGcuAAuucAGAAucAdTdT | 1065 | UGAUUCUGAAUuAGCUGuAdTdT | 1492 |
| AD-39773.1 | AcAGcuAAuucAGAAucAudTdT | 1066 | AUGAUUCUGAAUuAGCUGUdTdT | 1493 |
| AD-39732.1 | cAGcuAAuucAGAAucAuudTdT | 1067 | AAUGAUUCUGAAUuAGCUGdTdT | 1494 |
| AD-39738.1 | AGcuAAuucAGAAucAuuudTdT | 1068 | AAAUGAUUCUGAAUuAGCUdTdT | 1495 |
| AD-39744.1 | GcuAAuucAGAAucAuuuudTdT | 1069 | AAAAUGAUUCUGAAUuAGCdTdT | 1496 |
| AD-39750.1 | cuAAuucAGAAucAuuuuGdTdT | 1070 | cAAAAUGAUUCUGAAUuAGdTdT | 1497 |
| AD-39756.1 | uAAuucAGAAucAuuuuGudTdT | 1071 | AcAAAAUGAUUCUGAAUuAdTdT | 1498 |
| AD-39762.1 | AAuucAGAAucAuuuuGuGdTdT | 1072 | cAcAAAAUGAUUCUGAAUUdTdT | 1499 |
| AD-39768.1 | AuucAGAAucAuuuuGuGGdTdT | 1073 | CcAcAAAAUGAUUCUGAAUdTdT | 1500 |
| AD-39774.1 | uucAGAAucAuuuuGuGGAdTdT | 1074 | UCcAcAAAAUGAUUCUGAAdTdT | 1501 |
| AD-39733.1 | ucAGAAucAuuuuGuGGAcdTdT | 1075 | GUCcAcAAAAUGAUUCUGAdTdT | 1502 |
| AD-39739.1 | cAGAAucAuuuuGuGGAcGdTdT | 1076 | CGUCcAcAAAAUGAUUCUGdTdT | 1503 |
| AD-39745.1 | AGAAucAuuuuGuGGAcGAdTdT | 1077 | UCGUCcAcAAAAUGAUUCUdTdT | 1504 |
| AD-39751.1 | GAAucAuuuuGuGGAcGAAdTdT | 1078 | UUCGUCcAcAAAAUGAUUCdTdT | 1505 |
| AD-39757.1 | AAucAuuuuGuGGAcGAAudTdT | 1079 | AUUCGUCcAcAAAAUGAUUdTdT | 1506 |
| AD-39763.1 | AucAuuuuGuGGAcGAAuAdTdT | 1080 | uAUUCGUCcAcAAAAUGAUdTdT | 1507 |
| AD-39769.1 | ucAuuuuGuGGAcGAAuAudTdT | 1081 | AuAUUCGUCcAcAAAAUGAdTdT | 1508 |
| AD-39775.1 | cAuuuuGuGGAcGAAuAuGdTdT | 1082 | cAuAUUCGUCcAcAAAAUGdTdT | 1509 |
| AD-39734.1 | AuuuuGuGGAcGAAuAuGAdTdT | 1083 | UcAuAUUCGUCcAcAAAAUdTdT | 1510 |
| AD-39740.1 | uuuuGuGGAcGAAuAuGAudTdT | 1084 | AUcAuAUUCGUCcAcAAAAdTdT | 1511 |
| AD-39746.1 | uuuGuGGAcGAAuAuGAucdTdT | 1085 | GAUcAuAUUCGUCcAcAAAdTdT | 1512 |
| AD-39752.1 | uuGuGGAcGAAuAuGAuccdTdT | 1086 | GGAUcAuAUUCGUCcAcAAdTdT | 1513 |
| AD-39758.1 | uGuGGAcGAAuAuGAuccAdTdT | 1087 | UGGAUcAuAUUCGUCcAcAdTdT | 1514 |
| AD-39764.1 | GuGGAcGAAuAuGAuccAAdTdT | 1088 | UUGGAUcAuAUUCGUCcACdTdT | 1515 |
| AD-39770.1 | uGGAcGAAuAuGAuccAAcdTdT | 1089 | GUUGGAUcAuAUUCGUCcAdTdT | 1516 |
| AD-39776.1 | AGGAAGcAAGuAGuAAuuGdTdT | 1090 | cAAUuACuACUUGCUUCCUdTdT | 1517 |
| AD-39735.1 | GGAAGcAAGuAGuAAuuGAdTdT | 1091 | UcAAUuACuACUUGCUUCCdTdT | 1518 |
| AD-39741.1 | GAAGcAAGuAGuAAuuGAudTdT | 1092 | AUcAAUuACuACUUGCUUCdTdT | 1519 |
| AD-39747.1 | AAGcAAGuAGuAAuuGAuGdTdT | 1093 | cAUcAAUuACuACUUGCUUdTdT | 1520 |
| AD-39753.1 | AGcAAGuAGuAAuuGAuGGdTdT | 1094 | CcAUcAAUuACuACUUGCUdTdT | 1521 |
| AD-39759.1 | GcAAGuAGuAAuuGAuGGAdTdT | 1095 | UCcAUcAAUuACuACUUGCdTdT | 1522 |
| AD-39765.1 | cAAGuAGuAAuuGAuGGAGdTdT | 1096 | CUCcAUcAAUuACuACUUGdTdT | 1523 |
| AD-39771.1 | AAGuAGuAAuuGAuGGAGAdTdT | 1097 | UCUCcAUcAAUuACuACUUdTdT | 1524 |
| AD-39778.1 | AGuAGuAAuuGAuGGAGAAdTdT | 1098 | UUCUCcAUcAAUuACuACUdTdT | 1525 |
| AD-39784.1 | GuAGuAAuuGAuGGAGAAAdTdT | 1099 | UUUCUCcAUcAAUuACuACdTdT | 1526 |
| AD-39790.1 | uAGuAAuuGAuGGAGAAAcdTdT | 1100 | GUUUCUCcAUcAAUuACuAdTdT | 1527 |
| AD-39796.1 | AGuAAuuGAuGGAGAAAccdTdT | 1101 | GGUUUCUCcAUcAAUuACUdTdT | 1528 |
| AD-39802.1 | GuAAuuGAuGGAGAAAccudTdT | 1102 | AGGUUUCUCcAUcAAUuACdTdT | 1529 |
| AD-39808.1 | uAAuuGAuGGAGAAAccuGdTdT | 1103 | cAGGUUUCUCcAUcAAUuAdTdT | 1530 |
| AD-39814.1 | AAuuGAuGGAGAAAccuGudTdT | 1104 | AcAGGUUUCUCcAUcAAUUdTdT | 1531 |
| AD-39820.1 | AuuGAuGGAGAAAccuGucdTdT | 1105 | GAcAGGUUUCUCcAUcAAUdTdT | 1532 |
| AD-39779.1 | uuGAuGGAGAAAccuGucudTdT | 1106 | AGAcAGGUUUCUCcAUcAAdTdT | 1533 |
| AD-39785.1 | uGAuGGAGAAAccuGucucdTdT | 1107 | GAGAcAGGUUUCUCcAUcAdTdT | 1534 |
| AD-39791.1 | GAuGGAGAAAccuGucucudTdT | 1108 | AGAGAcAGGUUUCUCcAUCdTdT | 1535 |
| AD-39797.1 | AuGGAGAAAccuGucucuudTdT | 1109 | AAGAGAcAGGUUUCUCcAUdTdT | 1536 |
| AD-39803.1 | uGGAGAAAccuGucucuuGdTdT | 1110 | cAAGAGAcAGGUUUCUCcAdTdT | 1537 |
| AD-39809.1 | GGAGAAAccuGucucuuGGdTdT | 1111 | CcAAGAGAcAGGUUUCUCCdTdT | 1538 |
| AD-39815.1 | GAGAAAccuGucucuuGGAdTdT | 1112 | UCcAAGAGAcAGGUUUCUCdTdT | 1539 |
| AD-39821.1 | AGAAAccuGucucuuGGAudTdT | 1113 | AUCcAAGAGAcAGGUUUCUdTdT | 1540 |
| AD-39780.1 | GAAAccuGucucuuGGAuAdTdT | 1114 | uAUCcAAGAGAcAGGUUUCdTdT | 1541 |
| AD-39786.1 | AAAccuGucucuuGGAuAudTdT | 1115 | AuAUCcAAGAGAcAGGUUUdTdT | 1542 |
| AD-39792.1 | AAccuGucucuuGGAuAuudTdT | 1116 | AAuAUCcAAGAGAcAGGUUdTdT | 1543 |
| AD-39798.1 | AccuGucucuuGGAuAuucdTdT | 1117 | GAAuAUCcAAGAGAcAGGUdTdT | 1544 |
| AD-39804.1 | ccuGucucuuGGAuAuucudTdT | 1118 | AGAAuAUCcAAGAGAcAGGdTdT | 1545 |
| AD-39810.1 | cuGucucuuGGAuAuucucdTdT | 1119 | GAGAAuAUCcAAGAGAcAGdTdT | 1546 |
| AD-39816.1 | uGucucuuGGAuAuucucGdTdT | 1120 | CGAGAAuAUCcAAGAGAcAdTdT | 1547 |
| AD-39822.1 | GucucuuGGAuAuucucGAdTdT | 1121 | UCGAGAAuAUCcAAGAGACdTdT | 1548 |
| AD-39781.1 | ucucuuGGAuAuucucGAcdTdT | 1122 | GUCGAGAAuAUCcAAGAGAdTdT | 1549 |
| AD-39787.1 | cucuuGGAuAuucucGAcAdTdT | 1123 | UGUCGAGAAuAUCcAAGAGdTdT | 1550 |
| AD-39793.1 | ucuuGGAuAuucucGAcAcdTdT | 1124 | GUGUCGAGAAuAUCcAAGAdTdT | 1551 |
| AD-39799.1 | cuuGGAuAuucucGAcAcAdTdT | 1125 | UGUGUCGAGAAuAUCcAAGdTdT | 1552 |
| AD-39805.1 | AGuAcAGuGcAAuGAGGGAdTdT | 1126 | UCCCUcAUUGcACUGuACUdTdT | 1553 |
| AD-39811.1 | GuAcAGuGcAAuGAGGGAcdTdT | 1127 | GUCCCUcAUUGcACUGuACdTdT | 1554 |
| AD-39817.1 | uAcAGuGcAAuGAGGGAccdTdT | 1128 | GGUCCCUcAUUGcACUGuAdTdT | 1555 |
| AD-39823.1 | AcAGuGcAAuGAGGGAccAdTdT | 1129 | UGGUCCCUcAUUGcACUGUdTdT | 1556 |
| AD-39782.1 | cAGuGcAAuGAGGGAccAGdTdT | 1130 | CUGGUCCCUcAUUGcACUGdTdT | 1557 |
| AD-39788.1 | AGuGcAAuGAGGGAccAGudTdT | 1131 | ACUGGUCCCUcAUUGcACUdTdT | 1558 |
| AD-39794.1 | GuGcAAuGAGGGAccAGuAdTdT | 1132 | uACUGGUCCCUcAUUGcACdTdT | 1559 |
| AD-39800.1 | uGcAAuGAGGGAccAGuAcdTdT | 1133 | GuACUGGUCCCUcAUUGcAdTdT | 1560 |
| AD-39806.1 | GcAAuGAGGGAccAGuAcAdTdT | 1134 | UGuACUGGUCCCUcAUUGCdTdT | 1561 |
| AD-39812.1 | cAAuGAGGGAccAGuAcAudTdT | 1135 | AUGuACUGGUCCCUcAUUGdTdT | 1562 |
| AD-39818.1 | AAuGAGGGAccAGuAcAuGdTdT | 1136 | cAUGuACUGGUCCCUcAUUdTdT | 1563 |
| AD-39824.1 | AuGAGGGAccAGuAcAuGAdTdT | 1137 | UcAUGuACUGGUCCCUcAUdTdT | 1564 |
| AD-39783.1 | uGAGGGAccAGuAcAuGAGdTdT | 1138 | CUcAUGuACUGGUCCCUcAdTdT | 1565 |
| AD-39789.1 | GAGGGAccAGuAcAuGAGGdTdT | 1139 | CCUcAUGuACUGGUCCCUCdTdT | 1566 |
| AD-39795.1 | AGGGAccAGuAcAuGAGGAdTdT | 1140 | UCCUcAUGuACUGGUCCCUdTdT | 1567 |
| AD-39801.1 | GGGAccAGuAcAuGAGGAcdTdT | 1141 | GUCCUcAUGuACUGGUCCCdTdT | 1568 |
| AD-39807.1 | GGAccAGuAcAuGAGGAcudTdT | 1142 | AGUCCUcAUGuACUGGUCCdTdT | 1569 |
| AD-39813.1 | GAccAGuAcAuGAGGAcuGdTdT | 1143 | cAGUCCUcAUGuACUGGUCdTdT | 1570 |
| AD-39819.1 | AccAGuAcAuGAGGAcuGGdTdT | 1144 | CcAGUCCUcAUGuACUGGUdTdT | 1571 |
| AD-39825.1 | ccAGuAcAuGAGGAcuGGGdTdT | 1145 | CCcAGUCCUcAUGuACUGGdTdT | 1572 |
| AD-39831.1 | cAGuAcAuGAGGAcuGGGGdTdT | 1146 | CCCcAGUCCUcAUGuACUGdTdT | 1573 |
| AD-39837.1 | AGuAcAuGAGGAcuGGGGAdTdT | 1147 | UCCCcAGUCCUcAUGuACUdTdT | 1574 |
| AD-39843.1 | GuAcAuGAGGAcuGGGGAGdTdT | 1148 | CUCCCcAGUCCUcAUGuACdTdT | 1575 |
| AD-39849.1 | uAcAuGAGGAcuGGGGAGGdTdT | 1149 | CCUCCCcAGUCCUcAUGuAdTdT | 1576 |
| AD-39855.1 | AcAuGAGGAcuGGGGAGGGdTdT | 1150 | CCCUCCCcAGUCCUcAUGUdTdT | 1577 |
| AD-39861.1 | cAuGAGGAcuGGGGAGGGcdTdT | 1151 | GCCCUCCCcAGUCCUcAUGdTdT | 1578 |
| AD-39867.1 | AuGAGGAcuGGGGAGGGcudTdT | 1152 | AGCCCUCCCcAGUCCUcAUdTdT | 1579 |
| AD-39826.1 | uGAGGAcuGGGGAGGGcuudTdT | 1153 | AAGCCCUCCCcAGUCCUcAdTdT | 1580 |
| AD-39832.1 | GAGGAcuGGGGAGGGcuuudTdT | 1154 | AAAGCCCUCCCcAGUCCUCdTdT | 1581 |
| AD-39838.1 | AGGAcuGGGGAGGGcuuucdTdT | 1155 | GAAAGCCCUCCCcAGUCCUdTdT | 1582 |
| AD-39844.1 | GGAcuGGGGAGGGcuuucudTdT | 1156 | AGAAAGCCCUCCCcAGUCCdTdT | 1583 |
| AD-39850.1 | GAcuGGGGAGGGcuuucuudTdT | 1157 | AAGAAAGCCCUCCCcAGUCdTdT | 1584 |
| AD-39856.1 | AcuGGGGAGGGcuuucuuudTdT | 1158 | AAAGAAAGCCCUCCCcAGUdTdT | 1585 |
| AD-39862.1 | cuGGGGAGGGcuuucuuuGdTdT | 1159 | cAAAGAAAGCCCUCCCcAGdTdT | 1586 |
| AD-39868.1 | uGGGGAGGGcuuucuuuGudTdT | 1160 | AcAAAGAAAGCCCUCCCcAdTdT | 1587 |
| AD-39827.1 | uuGccAuAAAuAAuAcuAAdTdT | 1161 | UuAGuAUuAUUuAUGGcAAdTdT | 1588 |
| AD-39833.1 | uGccAuAAAuAAuAcuAAAdTdT | 1162 | UUuAGuAUuAUUuAUGGcAdTdT | 1589 |
| AD-39839.1 | GccAuAAAuAAuAcuAAAudTdT | 1163 | AUUuAGuAUuAUUuAUGGCdTdT | 1590 |
| AD-39845.1 | ccAuAAAuAAuAcuAAAucdTdT | 1164 | GAUUuAGuAUuAUUuAUGGdTdT | 1591 |
| AD-39851.1 | cAuAAAuAAuAcuAAAucAdTdT | 1165 | UGAUUuAGuAUuAUUuAUGdTdT | 1592 |
| AD-39857.1 | AuAAAuAAuAcuAAAucAudTdT | 1166 | AUGAUUuAGuAUuAUUuAUdTdT | 1593 |
| AD-39863.1 | uAAAuAAuAcuAAAucAuudTdT | 1167 | AAUGAUUuAGuAUuAUUuAdTdT | 1594 |
| AD-39869.1 | AAAuAAuAcuAAAucAuuudTdT | 1168 | AAAUGAUUuAGuAUuAUUUdTdT | 1595 |
| AD-39828.1 | AAuAAuAcuAAAucAuuuGdTdT | 1169 | cAAAUGAUUuAGuAUuAUUdTdT | 1596 |
| AD-39834.1 | AuAAuAcuAAAucAuuuGAdTdT | 1170 | UcAAAUGAUUuAGuAUuAUdTdT | 1597 |
| AD-39840.1 | uAAuAcuAAAucAuuuGAAdTdT | 1171 | UUcAAAUGAUUuAGuAUuAdTdT | 1598 |
| AD-39846.1 | AAuAcuAAAucAuuuGAAGdTdT | 1172 | CUUcAAAUGAUUuAGuAUUdTdT | 1599 |
| AD-39852.1 | AuAcuAAAucAuuuGAAGAdTdT | 1173 | UCUUcAAAUGAUUuAGuAUdTdT | 1600 |
| AD-39858.1 | uAcuAAAucAuuuGAAGAudTdT | 1174 | AUCUUcAAAUGAUUuAGuAdTdT | 1601 |
| AD-39864.1 | AcuAAAucAuuuGAAGAuAdTdT | 1175 | uAUCUUcAAAUGAUUuAGUdTdT | 1602 |
| AD-39870.1 | cuAAAucAuuuGAAGAuAudTdT | 1176 | AuAUCUUcAAAUGAUUuAGdTdT | 1603 |
| AD-39829.1 | uAAAucAuuuGAAGAuAuudTdT | 1177 | AAuAUCUUcAAAUGAUUuAdTdT | 1604 |
| AD-39835.1 | AAAucAuuuGAAGAuAuucdTdT | 1178 | GAAuAUCUUcAAAUGAUUUdTdT | 1605 |
| AD-39841.1 | AAucAuuuGAAGAuAuucAdTdT | 1179 | UGAAuAUCUUcAAAUGAUUdTdT | 1606 |
| AD-39853.1 | ucAuuuGAAGAuAuucAccdTdT | 1180 | GGUGAAuAUCUUcAAAUGAdTdT | 1607 |
| AD-39859.1 | cAuuuGAAGAuAuucAccAdTdT | 1181 | UGGUGAAuAUCUUcAAAUGdTdT | 1608 |
| AD-39865.1 | AuuuGAAGAuAuucAccAudTdT | 1182 | AUGGUGAAuAUCUUcAAAUdTdT | 1609 |
| AD-39871.1 | uuuGAAGAuAuucAccAuudTdT | 1183 | AAUGGUGAAuAUCUUcAAAdTdT | 1610 |
| AD-39830.1 | uuGAAGAuAuucAccAuuAdTdT | 1184 | uAAUGGUGAAuAUCUUcAAdTdT | 1611 |
| AD-39836.1 | GAGAAcAAAuuAAAAGAGudTdT | 1185 | ACUCUUUuAAUUUGUUCUCdTdT | 1612 |
| AD-39842.1 | AGAAcAAAuuAAAAGAGuudTdT | 1186 | AACUCUUUuAAUUUGUUCUdTdT | 1613 |
| AD-39848.1 | GAAcAAAuuAAAAGAGuuAdTdT | 1187 | uAACUCUUUuAAUUUGUUCdTdT | 1614 |
| AD-39854.1 | AAcAAAuuAAAAGAGuuAAdTdT | 1188 | UuAACUCUUUuAAUUUGUUdTdT | 1615 |
| AD-39860.1 | AcAAAuuAAAAGAGuuAAGdTdT | 1189 | CUuAACUCUUUuAAUUUGUdTdT | 1616 |
| AD-39866.1 | cAAAuuAAAAGAGuuAAGGdTdT | 1190 | CCUuAACUCUUUuAAUUUGdTdT | 1617 |
| AD-39992.1 | AAAuuAAAAGAGuuAAGGAdTdT | 1191 | UCCUuAACUCUUUuAAUUUdTdT | 1618 |
| AD-39998.1 | AAuuAAAAGAGuuAAGGAcdTdT | 1192 | GUCCUuAACUCUUUuAAUUdTdT | 1619 |
| AD-40004.1 | AuuAAAAGAGuuAAGGAcudTdT | 1193 | AGUCCUuAACUCUUUuAAUdTdT | 1620 |
| AD-40010.1 | uuAAAAGAGuuAAGGAcucdTdT | 1194 | GAGUCCUuAACUCUUUuAAdTdT | 1621 |
| AD-40016.1 | uAAAAGAGuuAAGGAcucudTdT | 1195 | AGAGUCCUuAACUCUUUuAdTdT | 1622 |
| AD-40022.1 | AAAAGAGuuAAGGAcucuGdTdT | 1196 | cAGAGUCCUuAACUCUUUUdTdT | 1623 |
| AD-40028.1 | AAAGAGuuAAGGAcucuGAdTdT | 1197 | UcAGAGUCCUuAACUCUUUdTdT | 1624 |
| AD-40034.1 | AAGAGuuAAGGAcucuGAAdTdT | 1198 | UUcAGAGUCCUuAACUCUUdTdT | 1625 |
| AD-39999.1 | GAGuuAAGGAcucuGAAGAdTdT | 1199 | UCUUcAGAGUCCUuAACUCdTdT | 1626 |
| AD-40005.1 | AGuuAAGGAcucuGAAGAudTdT | 1200 | AUCUUcAGAGUCCUuAACUdTdT | 1627 |
| AD-40011.1 | GuuAAGGAcucuGAAGAuGdTdT | 1201 | cAUCUUcAGAGUCCUuAACdTdT | 1628 |
| AD-40017.1 | uuAAGGAcucuGAAGAuGudTdT | 1202 | AcAUCUUcAGAGUCCUuAAdTdT | 1629 |
| AD-40029.1 | AAGGAcucuGAAGAuGuAcdTdT | 1203 | GuAcAUCUUcAGAGUCCUUdTdT | 1630 |
| AD-40035.1 | AGGAcucuGAAGAuGuAccdTdT | 1204 | GGuAcAUCUUcAGAGUCCUdTdT | 1631 |
| AD-39994.1 | GGAcucuGAAGAuGuAccudTdT | 1205 | AGGuAcAUCUUcAGAGUCCdTdT | 1632 |
| AD-40000.1 | GAcucuGAAGAuGuAccuAdTdT | 1206 | uAGGuAcAUCUUcAGAGUCdTdT | 1633 |
| AD-40006.1 | AcucuGAAGAuGuAccuAudTdT | 1207 | AuAGGuAcAUCUUcAGAGUdTdT | 1634 |
| AD-40012.1 | cucuGAAGAuGuAccuAuGdTdT | 1208 | cAuAGGuAcAUCUUcAGAGdTdT | 1635 |
| AD-40018.1 | ucuGAAGAuGuAccuAuGGdTdT | 1209 | CcAuAGGuAcAUCUUcAGAdTdT | 1636 |
| AD-40024.1 | cuGAAGAuGuAccuAuGGudTdT | 1210 | ACcAuAGGuAcAUCUUcAGdTdT | 1637 |
| AD-40030.1 | uGAAGAuGuAccuAuGGucdTdT | 1211 | GACcAuAGGuAcAUCUUcAdTdT | 1638 |
| AD-40036.1 | GuAGGAAAuAAAuGuGAuudTdT | 1212 | AAUcAcAUUuAUUUCCuACdTdT | 1639 |
| AD-39995.1 | uAGGAAAuAAAuGuGAuuudTdT | 1213 | AAAUcAcAUUuAUUUCCuAdTdT | 1640 |
| AD-40001.1 | AGGAAAuAAAuGuGAuuuGdTdT | 1214 | cAAAUcAcAUUuAUUUCCUdTdT | 1641 |
| AD-40007.1 | GGAAAuAAAuGuGAuuuGcdTdT | 1215 | GcAAAUcAcAUUuAUUUCCdTdT | 1642 |
| AD-40013.1 | GAAAuAAAuGuGAuuuGccdTdT | 1216 | GGcAAAUcAcAUUuAUUUCdTdT | 1643 |
| AD-40019.1 | AAAuAAAuGuGAuuuGccudTdT | 1217 | AGGcAAAUcAcAUUuAUUUdTdT | 1644 |
| AD-40025.1 | AAuAAAuGuGAuuuGccuudTdT | 1218 | AAGGcAAAUcAcAUUuAUUdTdT | 1645 |
| AD-40031.1 | AuAAAuGuGAuuuGccuucdTdT | 1219 | GAAGGcAAAUcAcAUUuAUdTdT | 1646 |
| AD-40037.1 | uAAAuGuGAuuuGccuucudTdT | 1220 | AGAAGGcAAAUcAcAUUuAdTdT | 1647 |
| AD-39996.1 | AAAuGuGAuuuGccuucuAdTdT | 1221 | uAGAAGGcAAAUcAcAUUUdTdT | 1648 |
| AD-40002.1 | AAuGuGAuuuGccuucuAGdTdT | 1222 | CuAGAAGGcAAAUcAcAUUdTdT | 1649 |
| AD-40008.1 | AuGuGAuuuGccuucuAGAdTdT | 1223 | UCuAGAAGGcAAAUcAcAUdTdT | 1650 |
| AD-40014.1 | uGuGAuuuGccuucuAGAAdTdT | 1224 | UUCuAGAAGGcAAAUcAcAdTdT | 1651 |
| AD-40020.1 | GuGAuuuGccuucuAGAAcdTdT | 1225 | GUUCuAGAAGGcAAAUcACdTdT | 1652 |
| AD-40026.1 | uGAuuuGccuucuAGAAcAdTdT | 1226 | UGUUCuAGAAGGcAAAUcAdTdT | 1653 |
| AD-40032.1 | GAuuuGccuucuAGAAcAGdTdT | 1227 | CUGUUCuAGAAGGcAAAUCdTdT | 1654 |
| AD-40038.1 | AuuuGccuucuAGAAcAGudTdT | 1228 | ACUGUUCuAGAAGGcAAAUdTdT | 1655 |
| AD-39997.1 | uuuGccuucuAGAAcAGuAdTdT | 1229 | uACUGUUCuAGAAGGcAAAdTdT | 1656 |
| AD-40009.1 | uGccuucuAGAAcAGuAGAdTdT | 1230 | UCuACUGUUCuAGAAGGcAdTdT | 1657 |
| AD-40015.1 | GccuucuAGAAcAGuAGAcdTdT | 1231 | GUCuACUGUUCuAGAAGGCdTdT | 1658 |
| AD-40021.1 | ccuucuAGAAcAGuAGAcAdTdT | 1232 | UGUCuACUGUUCuAGAAGGdTdT | 1659 |
| AD-40027.1 | cuucuAGAAcAGuAGAcAcdTdT | 1233 | GUGUCuACUGUUCuAGAAGdTdT | 1660 |
| AD-40033.1 | uucuAGAAcAGuAGAcAcAdTdT | 1234 | UGUGUCuACUGUUCuAGAAdTdT | 1661 |
| AD-40039.1 | ucuAGAAcAGuAGAcAcAAdTdT | 1235 | UUGUGUCuACUGUUCuAGAdTdT | 1662 |
| AD-40045.1 | cuAGAAcAGuAGAcAcAAAdTdT | 1236 | UUUGUGUCuACUGUUCuAGdTdT | 1663 |
| AD-40051.1 | uAGAAcAGuAGAcAcAAAAdTdT | 1237 | UUUUGUGUCuACUGUUCuAdTdT | 1664 |
| AD-40057.1 | AGAAcAGuAGAcAcAAAAcdTdT | 1238 | GUUUUGUGUCuACUGUUCUdTdT | 1665 |
| AD-40063.1 | GAAcAGuAGAcAcAAAAcAdTdT | 1239 | UGUUUUGUGUCuACUGUUCdTdT | 1666 |
| AD-40069.1 | AAcAGuAGAcAcAAAAcAGdTdT | 1240 | CUGUUUUGUGUCuACUGUUdTdT | 1667 |
| AD-40075.1 | AcAGuAGAcAcAAAAcAGGdTdT | 1241 | CCUGUUUUGUGUCuACUGUdTdT | 1668 |
| AD-40081.1 | cAGuAGAcAcAAAAcAGGcdTdT | 1242 | GCCUGUUUUGUGUCuACUGdTdT | 1669 |
| AD-40040.1 | AGuAGAcAcAAAAcAGGcudTdT | 1243 | AGCCUGUUUUGUGUCuACUdTdT | 1670 |
| AD-40046.1 | GuAGAcAcAAAAcAGGcucdTdT | 1244 | GAGCCUGUUUUGUGUCuACdTdT | 1671 |
| AD-40052.1 | uAGAcAcAAAAcAGGcucAdTdT | 1245 | UGAGCCUGUUUUGUGUCuAdTdT | 1672 |
| AD-40058.1 | AGAcAcAAAAcAGGcucAGdTdT | 1246 | CUGAGCCUGUUUUGUGUCUdTdT | 1673 |
| AD-40064.1 | GAcAcAAAAcAGGcucAGGdTdT | 1247 | CCUGAGCCUGUUUUGUGUCdTdT | 1674 |
| AD-40070.1 | AcAcAAAAcAGGcucAGGAdTdT | 1248 | UCCUGAGCCUGUUUUGUGUdTdT | 1675 |
| AD-40076.1 | cAcAAAAcAGGcucAGGAcdTdT | 1249 | GUCCUGAGCCUGUUUUGUGdTdT | 1676 |
| AD-40082.1 | AcAAAAcAGGcucAGGAcudTdT | 1250 | AGUCCUGAGCCUGUUUUGUdTdT | 1677 |
| AD-40041.1 | cAAAAcAGGcucAGGAcuudTdT | 1251 | AAGUCCUGAGCCUGUUUUGdTdT | 1678 |
| AD-40047.1 | AAAAcAGGcucAGGAcuuAdTdT | 1252 | uAAGUCCUGAGCCUGUUUUdTdT | 1679 |
| AD-40053.1 | AAAcAGGcucAGGAcuuAGdTdT | 1253 | CuAAGUCCUGAGCCUGUUUdTdT | 1680 |
| AD-40059.1 | AAcAGGcucAGGAcuuAGcdTdT | 1254 | GCuAAGUCCUGAGCCUGUUdTdT | 1681 |
| AD-40065.1 | AcAGGcucAGGAcuuAGcAdTdT | 1255 | UGCuAAGUCCUGAGCCUGUdTdT | 1682 |
| AD-40071.1 | cAGGcucAGGAcuuAGcAAdTdT | 1256 | UUGCuAAGUCCUGAGCCUGdTdT | 1683 |
| AD-40077.1 | AGGcucAGGAcuuAGcAAGdTdT | 1257 | CUUGCuAAGUCCUGAGCCUdTdT | 1684 |
| AD-40083.1 | GGcucAGGAcuuAGcAAGAdTdT | 1258 | UCUUGCuAAGUCCUGAGCCdTdT | 1685 |
| AD-40042.1 | GcucAGGAcuuAGcAAGAAdTdT | 1259 | UUCUUGCuAAGUCCUGAGCdTdT | 1686 |
| AD-40048.1 | cucAGGAcuuAGcAAGAAGdTdT | 1260 | CUUCUUGCuAAGUCCUGAGdTdT | 1687 |
| AD-40054.1 | ucAGGAcuuAGcAAGAAGudTdT | 1261 | ACUUCUUGCuAAGUCCUGAdTdT | 1688 |
| AD-40060.1 | cAGGAcuuAGcAAGAAGuudTdT | 1262 | AACUUCUUGCuAAGUCCUGdTdT | 1689 |
| AD-40066.1 | AGGAcuuAGcAAGAAGuuAdTdT | 1263 | uAACUUCUUGCuAAGUCCUdTdT | 1690 |
| AD-40072.1 | GGAcuuAGcAAGAAGuuAudTdT | 1264 | AuAACUUCUUGCuAAGUCCdTdT | 1691 |
| AD-40078.1 | GAcuuAGcAAGAAGuuAuGdTdT | 1265 | cAuAACUUCUUGCuAAGUCdTdT | 1692 |
| AD-40084.1 | AcuuAGcAAGAAGuuAuGGdTdT | 1266 | CcAuAACUUCUUGCuAAGUdTdT | 1693 |
| AD-40043.1 | cuuAGcAAGAAGuuAuGGAdTdT | 1267 | UCcAuAACUUCUUGCuAAGdTdT | 1694 |
| AD-40049.1 | uuAGcAAGAAGuuAuGGAAdTdT | 1268 | UUCcAuAACUUCUUGCuAAdTdT | 1695 |
| AD-40055.1 | uAGcAAGAAGuuAuGGAAudTdT | 1269 | AUUCcAuAACUUCUUGCuAdTdT | 1696 |
| AD-40061.1 | AGcAAGAAGuuAuGGAAuudTdT | 1270 | AAUUCcAuAACUUCUUGCUdTdT | 1697 |
| AD-40067.1 | GcAAGAAGuuAuGGAAuucdTdT | 1271 | GAAUUCcAuAACUUCUUGCdTdT | 1698 |
| AD-40073.1 | cAAGAAGuuAuGGAAuuccdTdT | 1272 | GGAAUUCcAuAACUUCUUGdTdT | 1699 |
| AD-40079.1 | AAGAAGuuAuGGAAuuccudTdT | 1273 | AGGAAUUCcAuAACUUCUUdTdT | 1700 |
| AD-40085.1 | AGAAGuuAuGGAAuuccuudTdT | 1274 | AAGGAAUUCcAuAACUUCUdTdT | 1701 |
| AD-40044.1 | GAAGuuAuGGAAuuccuuudTdT | 1275 | AAAGGAAUUCcAuAACUUCdTdT | 1702 |
| AD-40050.1 | AAGuuAuGGAAuuccuuuudTdT | 1276 | AAAAGGAAUUCcAuAACUUdTdT | 1703 |
| AD-40056.1 | AGuuAuGGAAuuccuuuuAdTdT | 1277 | uAAAAGGAAUUCcAuAACUdTdT | 1704 |
| AD-40062.1 | GuuAuGGAAuuccuuuuAudTdT | 1278 | AuAAAAGGAAUUCcAuAACdTdT | 1705 |
| AD-40068.1 | uuAuGGAAuuccuuuuAuudTdT | 1279 | AAuAAAAGGAAUUCcAuAAdTdT | 1706 |
| AD-40074.1 | uAuGGAAuuccuuuuAuuGdTdT | 1280 | cAAuAAAAGGAAUUCcAuAdTdT | 1707 |
| AD-40080.1 | AuGGAAuuccuuuuAuuGAdTdT | 1281 | UcAAuAAAAGGAAUUCcAUdTdT | 1708 |
| AD-39720.1 | ActtGtGGtAGttGGAGcttt | 1792 | AGCTCcAACtACcAcAAGTtt | 1830 |
| AD-39706.1 | GcAAGAGtGccttGAcGAttt | 1793 | ATCGTcAAGGcACTCTTGCtt | 1831 |
| AD-39712.1 | cAAGAGtGccttGAcGAtAtt | 1794 | tATCGTcAAGGcACTCTTGtt | 1832 |
| AD-39760.1 | ccttGAcGAtAcAGctAAttt | 1795 | ATtAGCTGtATCGTcAAGGtt | 1833 |
| AD-39732.1 | cAGctAAttcAGAAtcAtttt | 1796 | AATGATTCTGAATtAGCTGtt | 1834 |
| AD-35541.4 | cGAAtAtGAtccAAcAAtAtt | 1797 | tATTGTTGGATcAtATTCGtt | 1835 |
| AD-39735.1 | GGAAGcAAGtAGtAAttGAuu | 1798 | TcAATtACtACTTGCTTCCuu | 1836 |
| or hs_KRAS | | | | |
| 321_A22S26 | | | | |
| AD-39741.1 | GAAGcAAGtAGtAAttGAtuu | 1799 | ATcAATtACtACTTGCTTCuu | 1837 |
| or hs_KRAS | | | | |
| 322_A22S26 | | | | |
| AD-39778.1 | AGtAGtAAttGAtGGAGAAtt | 1800 | TTCTCcATcAATtACtACTtt | 1838 |
| AD-39790.1 | tAGtAAttGAtGGAGAAActt | 1801 | GTTTCTCcATcAATtACtAtt | 1839 |
| AD-39822.1 | GtctcttGGAtAttctcGAtt | 1802 | TCGAGAAtATCcAAGAGACtt | 1840 |
| AD-35609.4 | GGGctttctttGtGtAttttt | 1803 | AAAtAcAcAAAGAAAGCCCtt | 1841 |
| AD-35581.4 | GtGtAtttGccAtAAAtAAtt | 1804 | TtATTtATGGcAAAtAcACtt | 1842 |
| AD-39845.1 | ccAtAAAtAAtActAAAtctt | 1805 | GATTtAGtATtATTtATGGtt | 1843 |
| AD-39858.1 | tActAAAtcAtttGAAGAttt | 1806 | ATCTTcAAATGATTtAGtAtt | 1844 |
| AD-39870.1 | ctAAAtcAtttGAAGAtAtuu | 1807 | AtATCTTcAAATGATTtAGuu | 1845 |
| AD-35576.4 | GAAGAtAttcAccAttAtAtt | 1808 | tAtAATGGTGAAtATCTTCtt | 1846 |
| AD-35588.4 | AGAtAttcAccAttAtAGAtt | 1809 | TCtAtAATGGTGAAtATCTtt | 1847 |
| AD-35600.1 | AtAttcAccAttAtAGAGAtt | 1810 | TCTCtAtAATGGTGAAtATtt | 1848 |
| AD-35606.1 | tAttcAccAttAtAGAGAAtt | 1811 | TTCTCtAtAATGGTGAAtAtt | 1849 |
| AD-38151.1 | cAttAtAGAGAAcAAAttAtt | 1812 | tAATTTGTTCTCtAtAATGtt | 1850 |
| AD-38163.1 | ttAtAGAGAAcAAAttAAAtt | 1813 | TTtAATTTGTTCTCtAtAAtt | 1851 |
| AD-39999.1 | GAGttAAGGActctGAAGAtt | 1814 | TCTTcAGAGTCCTtAACTCtt | 1852 |
| AD-38159.1 | ctAtGGtcctAGtAGGAAAuu | 1815 | TTTCCtACtAGGACcAtAGuu | 1853 |
| or hs_KRAS | | | | |
| 528_A22S26 | | | | |
| AD-38130.1 | tGGtcctAGtAGGAAAtAAuu | 1816 | TtATTTCCtACtAGGACcAuu | 1854 |
| or hs_KRAS | | | | |
| 531_A22S26 | | | | |
| AD-38136.1 | GGtcctAGtAGGAAAtAAAtt | 1817 | TTtATTTCCtACtAGGACCtt | 1855 |
| AD-40036.1 | GtAGGAAAtAAAtGtGAtttt | 1818 | AATcAcATTtATTTCCtACtt | 1856 |
| AD-40008.1 | AtGtGAtttGccttctAGAtt | 1819 | TCtAGAAGGcAAATcAcATtt | 1857 |
| AD-40021.1 | ccttctAGAAcAGtAGAcAtt | 1820 | TGTCtACTGTTCtAGAAGGtt | 1858 |
| AD-40077.1 | AGGctcAGGActtAGcAAGtt | 1821 | CTTGCtAAGTCCTGAGCCTtt | 1859 |
| AD-40072.1 | GGActtAGcAAGAAGttAttt | 1822 | AtAACTTCTTGCtAAGTCCtt | 1860 |
| AD-40061.1 | AGcAAGAAGttAtGGAAtttt | 1823 | AATTCcAtAACTTCTTGCTtt | 1861 |
| AD-40068.1 | ttAtGGAAttccttttAtttt | 1824 | AAtAAAAGGAATTCcAtAAtt | 1862 |
| AD-38131.1 | GGAAttccttttAttGAAAtt | 1825 | TTTcAAtAAAAGGAATTCCtt | 1863 |
| AD-38167.1 | ccttttAttGAAAcAtcAGtt | 1826 | CTGATGTTTcAAtAAAAGGtt | 1864 |
| hs_KRAS | cctGAtGAAtGtAAAGttAuu | 1827 | tAACTTtAcATTcATcAGGuu | 1865 |
| 1273_A22S26 | | | | |
| hs_KRAS | GGAGAAtttAAtAAAGAtAuu | 1828 | TATCTTtATtAAATTCTCCuu | 1866 |
| 2892_A37S26 | | | | |
| hs_KRAS | GAAtAGtcAtAActAGAttuu | 1829 | AATCtAGTtATGACtATTCuu | 1867 |
| 4731_A22S26 | | | | |

[3688] Modifications of the sequences of RNAi agents are easily conceived by one of skill in the art. Examples and non-limiting modifications of these sequences are conceived and are also listed in Table 3. Note for example, that many sequences end with a terminal dTdT. This is a variant of the TT terminal overhang known to protect siRNAs from nuclease degradation (e.g., in blood serum or intestinal fluid). The dTdT or TT terminal overhangs are optional; they can be replaced by various types of 3′ end caps, provided that the 3′ end caps are capable of both mediating nuclease resistance and allowing siRNA activity.

[3689] Some modifications are placed at sites predicted to be sensitive to endonucleases.

[3690] Some modifications are designed to eliminate an immune response to the siRNA while preserving activity. In general, the sense strand is heavily modified, and the antisense strand lightly modified. Some modifications serve more than one purpose.

[3691] The sequences in Table s 1 to 3 are represented by these abbreviations:

TABLE 1A
ABBREVIATIONS

| Abbreviation | Nucleotide(s) |
|---|---|
| A | adenosine-5′-phosphate |
| C | cytidine-5′-phosphate |
| G | guanosine-5′-phosphate |
| dT | 2′-deoxy-thymidine-5′-phosphate |
| U | uridine-5′-phosphate |
| c | 2′-O-methylcytidine-5′-phosphate |
| u | 2′-O-methyluridine-5′-phosphate |
| sdT | 2′-deoxy Thymidine 5′-phosphorothioate |

[3692] siRNA Sequence Selection

[3693] Sense and antisense human SCNNB1-derived siRNA oligos (RNAi agents to KRAS) are synthesized, as described herein. The sense and their respective antisense oligos are annealed into duplexes.

### Example 2

### Overlapping Sets of KRAS RNAi Agents

[3694] The present disclosure also relates to groups of RNAi agents to KRAS with overlapping sequences. Thus, the present disclosure encompasses groups of RNAi agents wherein each RNAi agent in the group overlaps with each other RNAi agent in the same group by at least 5, 6, 7, 8, 9, 10, 11, 12, 13, 14, 15, 16, 17, 18, 19 or more nucleotides. Particularly, in one embodiment, the overlap is at least 12 nt.

[3695] Some of the RNAi agents listed herein overlap each other in sequence. Table 4 presents a compilation of some of these groups of overlapping RNAi agents, wherein each member of a group overlaps with each other member of the same group by at least 12 nt. A 12-nt portion of the overlap of the sense and anti-sense strand are presented.

[3696] Thus, for example, as shown in Table 4, the sequences of duplexes AD-39695.1, AD-39689.1,AD-39707.1, AD-39683.1, and AD-39701.1 all overlap, wherein the overlap in sense strand comprises the sequence CUGAAUAUAAAC (SEQ ID NO: 1874) and the overlap in the anti-sense strand comprises the sequence GUUUAUAUUCAG (SEQ ID NO: 1875).

[3697] However, in the present disclosure encompasses any set or subset or group or subgroup of KRAS RNAi agents which share the common technical feature of a sequence overlap (e.g., by at least 12 nt). Thus the present disclosure also encompasses the example groups of AD-39695.1, AD-39689.1, AD-39707.1, AD-39683.1, and AD-39701.1, but also these subgroups: AD-39695.1 and AD-39689.1; AD-39695.1 and AD-39707.1; AD-39695.1, AD-39689.1, and AD-39701.1; AD-39689.1, AD-39707.1, and AD-39701.1; AD-39707.1 and AD-39683.1; AD-39707.1, AD-39683.1, and AD-39701.1; etc, and any other group of overlapping KRAS RNAi agents.

TABLE 4
Overlapping sets of KRAS RNAi agents

| | SEQ | | SEQ | |
|---|---|---|---|---|
| | ID | Anti-sense | ID | |
| Sense overlap | NO: | overlap | NO: | Overlapping RNAi agents to KRAS |
| UGACUGAAUAUA | 1868 | UAUAUUCAGUCA | 1869 | AD-39689.1, AD-39683.1 |
| GACUGAAUAUAA | 1870 | UUAUAUUCAGUC | 1871 | AD-39695.1, AD-39689.1, AD-39683.1 |
| ACUGAAUAUAAA | 1872 | UUUAUAUUCAGU | 1873 | AD-39695.1, AD-39689.1, AD- |
| | | | | 39683.1, AD-39701.1 |
| CUGAAUAUAAAC | 1874 | GUUUAUAUUCAG | 1875 | AD-39695.1, AD-39689.1, AD- |
| | | | | 39707.1, AD-39683.1, AD-39701.1 |
| UGAAUAUAAACU | 1876 | AGUUUAUAUUCA | 1877 | AD-39695.1, AD-39689.1, AD- |
| | | | | 39713.1, AD-39707.1, AD-39683.1, AD- |
| | | | | 39701.1 |
| GAAUAUAAACUU | 1878 | AAGUUUAUAUUC | 1879 | AD-39695.1, AD-39689.1, AD- |
| | | | | 39713.1, AD-39707.1, AD-39683.1, AD- |
| | | | | 39701.1, AD-39719.1 |
| AAUAUAAACUUG | 1880 | CAAGUUUAUAUU | 1881 | AD-39695.1, AD-39689.1, AD- |
| | | | | 39713.1, AD-39707.1, AD-39683.1, AD- |
| | | | | 39701.1, AD-39725.1, AD-39719.1 |
| AUAUAAACUUGU | 1882 | ACAAGUUUAUAU | 1883 | AD-39695.1, AD-39689.1, AD- |
| | | | | 39713.1, AD-39707.1, AD-39701.1, AD- |
| | | | | 39725.1, AD-39719.1, AD-39684.1 |
| UAUAAACUUGUG | 1884 | CACAAGUUUAUA | 1885 | AD-39690.1, AD-39695.1, AD- |
| | | | | 39713.1, AD-39707.1, AD-39701.1, AD- |
| | | | | 39725.1, AD-39719.1, AD-39684.1 |
| AUAAACUUGUGG | 1886 | CCACAAGUUUAU | 1887 | AD-39690.1, AD-39713.1, AD- |
| | | | | 39707.1, AD-39701.1, AD-39725.1, AD- |
| | | | | 39719.1, AD-39684.1, AD-39696.1 |
| UAAACUUGUGGU | 1888 | ACCACAAGUUUA | 1889 | AD-39690.1, AD-39713.1, AD- |
| | | | | 39707.1, AD-39725.1, AD-39702.1, AD- |
| | | | | 39719.1, AD-39684.1, AD-39696.1 |
| AAACUUGUGGUA | 1890 | UACCACAAGUUU | 1891 | AD-39690.1, AD-39713.1, AD- |
| | | | | 39725.1, AD-39702.1, AD-39719.1, AD- |
| | | | | 39684.1, AD-39696.1, AD-39708.1 |
| AACUUGUGGUAG | 1892 | CUACCACAAGUU | 1893 | AD-39690.1, AD-39725.1, AD- |
| | | | | 39702.1, AD-39719.1, AD-39684.1, AD- |
| | | | | 39714.1, AD-39696.1, AD-39708.1 |
| ACUUGUGGUAGU | 1894 | ACUACCACAAGU | 1895 | AD-39690.1, AD-39725.1, AD- |
| | | | | 39702.1, AD-39684.1, AD-39714.1, AD- |
| | | | | 39696.1, AD-39708.1, AD-39720.1 |
| CUUGUGGUAGUU | 1896 | AACUACCACAAG | 1897 | AD-39690.1, AD-39702.1, AD- |
| | | | | 39684.1, AD-39714.1, AD-39696.1, AD- |
| | | | | 39708.1, AD-39720.1, AD-39726.1 |
| UUGUGGUAGUUG | 1898 | CAACUACCACAA | 1899 | AD-39690.1, AD-39702.1, AD- |
| | | | | 39714.1, AD-39696.1, AD-39708.1, AD- |
| | | | | 39720.1, AD-39726.1, AD-39685.1 |
| UGUGGUAGUUGG | 1900 | CCAACUACCACA | 1901 | AD-39691.1, AD-39702.1, AD- |
| | | | | 39714.1, AD-39696.1, AD-39708.1, AD- |
| | | | | 39720.1, AD-39726.1, AD-39685.1 |
| GUGGUAGUUGGA | 1902 | UCCAACUACCAC | 1903 | AD-39691.1, AD-39697.1, AD- |
| | | | | 39702.1, AD-39714.1, AD-39708.1, AD- |
| | | | | 39720.1, AD-39726.1, AD-39685.1 |
| UGGUAGUUGGAG | 1904 | CUCCAACUACCA | 1905 | AD-39703.1, AD-39691.1, AD- |
| | | | | 39697.1, AD-39714.1, AD-39708.1, AD- |
| | | | | 39720.1, AD-39726.1, AD-39685.1 |
| GGUAGUUGGAGC | 1906 | GCUCCAACUACC | 1907 | AD-39703.1, AD-39691.1, AD- |
| | | | | 39697.1, AD-39714.1, AD-39709.1, AD- |
| | | | | 39720.1, AD-39726.1, AD-39685.1 |
| GUAGUUGGAGCU | 1908 | AGCUCCAACUAC | 1909 | AD-39703.1, AD-39691.1, AD- |
| | | | | 39697.1, AD-39715.1, AD-39709.1, AD- |
| | | | | 39720.1, AD-39726.1, AD-39685.1 |
| UAGUUGGAGCUG | 1910 | CAGCUCCAACUA | 1911 | AD-39703.1, AD-39691.1, AD- |
| | | | | 39697.1, AD-39715.1, AD-39709.1, AD- |
| | | | | 39721.1, AD-39726.1, AD-39685.1 |
| AGUUGGAGCUGG | 1912 | CCAGCUCCAACU | 1913 | AD-39703.1, AD-39691.1, AD- |
| | | | | 39697.1, AD-39715.1, AD-39709.1, AD- |
| | | | | 39721.1, AD-39727.1, AD-39685.1 |
| GUUGGAGCUGGU | 1914 | ACCAGCUCCAAC | 1915 | AD-39703.1, AD-39691.1, AD- |
| | | | | 39686.1, AD-39697.1, AD-39715.1, AD- |
| | | | | 39709.1, AD-39721.1, AD-39727.1 |
| UUGGAGCUGGUG | 1916 | CACCAGCUCCAA | 1917 | AD-39703.1, AD-39686.1, AD- |
| | | | | 39697.1, AD-39692.1, AD-39715.1, AD- |
| | | | | 39709.1, AD-39721.1, AD-39727.1 |
| UGGAGCUGGUGG | 1918 | CCACCAGCUCCA | 1919 | AD-39703.1, AD-39686.1, AD- |
| | | | | 39692.1, AD-39715.1, AD-39709.1, AD- |
| | | | | 39698.1, AD-39721.1, AD-39727.1 |
| GGAGCUGGUGGC | 1920 | GCCACCAGCUCC | 1921 | AD-39686.1, AD-39692.1, AD- |
| | | | | 39715.1, AD-39709.1, AD-39698.1, AD- |
| | | | | 39721.1, AD-39704.1, AD-39727.1 |
| GAGCUGGUGGCG | 1922 | CGCCACCAGCUC | 1923 | AD-39710.1, AD-39686.1, AD- |
| | | | | 39692.1, AD-39715.1, AD-39698.1, AD- |
| | | | | 39721.1, AD-39704.1, AD-39727.1 |
| AGCUGGUGGCGU | 1924 | ACGCCACCAGCU | 1925 | AD-39710.1, AD-39686.1, AD- |
| | | | | 39692.1, AD-39716.1, AD-39698.1, AD- |
| | | | | 39721.1, AD-39704.1, AD-39727.1 |
| GCUGGUGGCGUA | 1926 | UACGCCACCAGC | 1927 | AD-39710.1, AD-39686.1, AD- |
| | | | | 39692.1, AD-39722.1, AD-39716.1, AD- |
| | | | | 39698.1, AD-39704.1, AD-39727.1 |
| CUGGUGGCGUAG | 1928 | CUACGCCACCAG | 1929 | AD-39710.1, AD-39686.1, AD- |
| | | | | 39692.1, AD-39722.1, AD-39716.1, AD- |
| | | | | 39728.1, AD-39698.1, AD-39704.1 |
| UGGUGGCGUAGG | 1930 | CCUACGCCACCA | 1931 | AD-39710.1, AD-39687.1, AD- |
| | | | | 39692.1, AD-39722.1, AD-39716.1, AD- |
| | | | | 39728.1, AD-39698.1, AD-39704.1 |
| GGUGGCGUAGGC | 1932 | GCCUACGCCACC | 1933 | AD-39693.1, AD-39710.1, AD- |
| | | | | 39687.1, AD-39722.1, AD-39716.1, AD- |
| | | | | 39728.1, AD-39698.1, AD-39704.1 |
| GUGGCGUAGGCA | 1934 | UGCCUACGCCAC | 1935 | AD-39693.1, AD-39710.1, AD- |
| | | | | 39699.1, AD-39687.1, AD-39722.1, AD- |
| | | | | 39716.1, AD-39728.1, AD-39704.1 |
| UGGCGUAGGCAA | 1936 | UUGCCUACGCCA | 1937 | AD-39693.1, AD-39710.1, AD- |
| | | | | 39699.1, AD-39687.1, AD-39722.1, AD- |
| | | | | 39716.1, AD-39705.1, AD-39728.1 |
| GGCGUAGGCAAG | 1938 | CUUGCCUACGCC | 1939 | AD-39693.1, AD-39699.1, AD- |
| | | | | 39687.1, AD-39711.1, AD-39722.1, AD- |
| | | | | 39716.1, AD-39705.1, AD-39728.1 |
| GCGUAGGCAAGA | 1940 | UCUUGCCUACGC | 1941 | AD-39693.1, AD-39699.1, AD- |
| | | | | 39687.1, AD-39717.1, AD-39711.1, AD- |
| | | | | 39722.1, AD-39705.1, AD-39728.1 |
| CGUAGGCAAGAG | 1942 | CUCUUGCCUACG | 1943 | AD-39693.1, AD-39699.1, AD- |
| | | | | 39687.1, AD-39717.1, AD-39711.1, AD- |
| | | | | 39705.1, AD-39728.1, AD-39723.1 |
| GUAGGCAAGAGU | 1944 | ACUCUUGCCUAC | 1945 | AD-39693.1, AD-39699.1, AD- |
| | | | | 39687.1, AD-39717.1, AD-39711.1, AD- |
| | | | | 39729.1, AD-39705.1, AD-39723.1 |
| UAGGCAAGAGUG | 1946 | CACUCUUGCCUA | 1947 | AD-39693.1, AD-39699.1, AD- |
| | | | | 39717.1, AD-39711.1, AD-39688.1, AD- |
| | | | | 39729.1, AD-39705.1, AD-39723.1 |
| AGGCAAGAGUGC | 1948 | GCACUCUUGCCU | 1949 | AD-39699.1, AD-39717.1, AD- |
| | | | | 39711.1, AD-39688.1, AD-39729.1, AD- |
| | | | | 39705.1, AD-39694.1, AD-39723.1 |
| GGCAAGAGUGCC | 1950 | GGCACUCUUGCC | 1951 | AD-39717.1, AD-39711.1, AD- |
| | | | | 39688.1, AD-39729.1, AD-39705.1, AD- |
| | | | | 39694.1, AD-39700.1, AD-39723.1 |
| GCAAGAGUGCCU | 1952 | AGGCACUCUUGC | 1953 | AD-39717.1, AD-39711.1, AD- |
| | | | | 39688.1, AD-39729.1, AD-39706.1, AD- |
| | | | | 39694.1, AD-39700.1, AD-39723.1 |
| CAAGAGUGCCUU | 1954 | AAGGCACUCUUG | 1955 | AD-39712.1, AD-39717.1, AD- |
| | | | | 39688.1, AD-39729.1, AD-39706.1, AD- |
| | | | | 39694.1, AD-39700.1, AD-39723.1 |
| AAGAGUGCCUUG | 1956 | CAAGGCACUCUU | 1957 | AD-39718.1, AD-39712.1, AD- |
| | | | | 39688.1, AD-39729.1, AD-39706.1, AD- |
| | | | | 39694.1, AD-39700.1, AD-39723.1 |
| AGAGUGCCUUGA | 1958 | UCAAGGCACUCU | 1959 | AD-39718.1, AD-39712.1, AD- |
| | | | | 39724.1, AD-39688.1, AD-39729.1, AD- |
| | | | | 39706.1, AD-39694.1, AD-39700.1 |
| GAGUGCCUUGAC | 1960 | GUCAAGGCACUC | 1961 | AD-39718.1, AD-39712.1, AD- |
| | | | | 39724.1, AD-39688.1, AD-39706.1, AD- |
| | | | | 39694.1, AD-39700.1, AD-39730.1 |
| AGUGCCUUGACG | 1962 | CGUCAAGGCACU | 1963 | AD-39718.1, AD-39712.1, AD- |
| | | | | 39724.1, AD-39706.1, AD-39694.1, AD- |
| | | | | 39736.1, AD-39700.1, AD-39730.1 |
| GUGCCUUGACGA | 1964 | UCGUCAAGGCAC | 1965 | AD-39718.1, AD-39712.1, AD- |
| | | | | 39724.1, AD-39742.1, AD-39706.1, AD- |
| | | | | 39736.1, AD-39700.1, AD-39730.1 |
| UGCCUUGACGAU | 1966 | AUCGUCAAGGCA | 1967 | AD-39718.1, AD-39712.1, AD- |
| | | | | 39724.1, AD-39742.1, AD-39706.1, AD- |
| | | | | 39736.1, AD-39748.1, AD-39730.1 |
| GCCUUGACGAUA | 1968 | UAUCGUCAAGGC | 1969 | AD-39718.1, AD-39712.1, AD- |
| | | | | 39724.1, AD-39742.1, AD-39754.1, AD- |
| | | | | 39736.1, AD-39748.1, AD-39730.1 |
| CCUUGACGAUAC | 1970 | GUAUCGUCAAGG | 1971 | AD-39718.1, AD-39724.1, AD- |
| | | | | 39742.1, AD-39754.1, AD-39736.1, AD- |
| | | | | 39748.1, AD-39760.1, AD-39730.1 |
| CUUGACGAUACA | 1972 | UGUAUCGUCAAG | 1973 | AD-39724.1, AD-39742.1, AD- |
| | | | | 39754.1, AD-39736.1, AD-39748.1, AD- |
| | | | | 39760.1, AD-39730.1, AD-39766.1 |
| UUGACGAUACAG | 1974 | CUGUAUCGUCAA | 1975 | AD-39742.1, AD-39772.1, AD- |
| | | | | 39754.1, AD-39736.1, AD-39748.1, AD- |
| | | | | 39760.1, AD-39730.1, AD-39766.1 |
| UGACGAUACAGC | 1976 | GCUGUAUCGUCA | 1977 | AD-39742.1, AD-39772.1, AD- |
| | | | | 39754.1, AD-39736.1, AD-39731.1, AD- |
| | | | | 39748.1, AD-39760.1, AD-39766.1 |
| GACGAUACAGCU | 1978 | AGCUGUAUCGUC | 1979 | AD-39737.1, AD-39742.1, AD- |
| | | | | 39772.1, AD-39754.1, AD-39731.1, AD- |
| | | | | 39748.1, AD-39760.1, AD-39766.1 |
| ACGAUACAGCUA | 1980 | UAGCUGUAUCGU | 1981 | AD-39737.1, AD-39772.1, AD- |
| | | | | 39754.1, AD-39743.1, AD-39731.1, AD- |
| | | | | 39748.1, AD-39760.1, AD-39766.1 |
| CGAUACAGCUAA | 1982 | UUAGCUGUAUCG | 1983 | AD-39737.1, AD-39772.1, AD- |
| | | | | 39754.1, AD-39743.1, AD-39731.1, AD- |
| | | | | 39760.1, AD-39749.1, AD-39766.1 |
| GAUACAGCUAAU | 1984 | AUUAGCUGUAUC | 1985 | AD-39737.1, AD-39772.1, AD- |
| | | | | 39743.1, AD-39731.1, AD-39760.1, AD- |
| | | | | 39749.1, AD-39755.1, AD-39766.1 |
| AUACAGCUAAUU | 1986 | AAUUAGCUGUAU | 1987 | AD-39761.1, AD-39737.1, AD- |
| | | | | 39772.1, AD-39743.1, AD-39731.1, AD- |
| | | | | 39749.1, AD-39755.1, AD-39766.1 |
| UACAGCUAAUUC | 1988 | GAAUUAGCUGUA | 1989 | AD-39767.1, AD-39761.1, AD- |
| | | | | 39737.1, AD-39772.1, AD-39743.1, AD- |
| | | | | 39731.1, AD-39749.1, AD-39755.1 |
| ACAGCUAAUUCA | 1990 | UGAAUUAGCUGU | 1991 | AD-39767.1, AD-39761.1, AD- |
| | | | | 39737.1, AD-39743.1, AD-39731.1, AD- |
| | | | | 39773.1, AD-39749.1, AD-39755.1 |
| CAGCUAAUUCAG | 1992 | CUGAAUUAGCUG | 1993 | AD-39767.1, AD-39761.1, AD- |
| | | | | 39737.1, AD-39732.1, AD-39743.1, AD- |
| | | | | 39773.1, AD-39749.1, AD-39755.1 |
| AGCUAAUUCAGA | 1994 | UCUGAAUUAGCU | 1995 | AD-39767.1, AD-39761.1, AD- |
| | | | | 39732.1, AD-39743.1, AD-39738.1, AD- |
| | | | | 39773.1, AD-39749.1, AD-39755.1 |
| GCUAAUUCAGAA | 1996 | UUCUGAAUUAGC | 1997 | AD-39767.1, AD-39761.1, AD- |
| | | | | 39744.1, AD-39732.1, AD-39738.1, AD- |
| | | | | 39773.1, AD-39749.1, AD-39755.1 |
| CUAAUUCAGAAU | 1998 | AUUCUGAAUUAG | 1999 | AD-39767.1, AD-39761.1, AD- |
| | | | | 39744.1, AD-39732.1, AD-39750.1, AD- |
| | | | | 39738.1, AD-39773.1, AD-39755.1 |
| UAAUUCAGAAUC | 2000 | GAUUCUGAAUUA | 2001 | AD-39756.1, AD-39767.1, AD- |
| | | | | 39761.1, AD-39744.1, AD-39732.1, AD- |
| | | | | 39750.1, AD-39738.1, AD-39773.1 |
| AAUUCAGAAUCA | 2002 | UGAUUCUGAAUU | 2003 | AD-39756.1, AD-39767.1, AD- |
| | | | | 39744.1, AD-39762.1, AD-39732.1, AD- |
| | | | | 39750.1, AD-39738.1, AD-39773.1 |
| AUUCAGAAUCAU | 2004 | AUGAUUCUGAAU | 2005 | AD-39756.1, AD-39744.1, AD- |
| | | | | 39762.1, AD-39732.1, AD-39768.1, AD- |
| | | | | 39750.1, AD-39738.1, AD-39773.1 |
| UUCAGAAUCAUU | 2006 | AAUGAUUCUGAA | 2007 | AD-39756.1, AD-39774.1, AD- |
| | | | | 39744.1, AD-39762.1, AD-39732.1, AD- |
| | | | | 39768.1, AD-39750.1, AD-39738.1 |
| UCAGAAUCAUUU | 2008 | AAAUGAUUCUGA | 2009 | AD-39756.1, AD-39774.1, AD- |
| | | | | 39744.1, AD-39762.1, AD-39733.1, AD- |
| | | | | 39768.1, AD-39750.1, AD-39738.1 |
| CAGAAUCAUUUU | 2010 | AAAAUGAUUCUG | 2011 | AD-39756.1, AD-39739.1, AD- |
| | | | | 39774.1, AD-39744.1, AD-39762.1, AD- |
| | | | | 39733.1, AD-39768.1, AD-39750.1 |
| AGAAUCAUUUUG | 2012 | CAAAAUGAUUCU | 2013 | AD-39745.1, AD-39756.1, AD- |
| | | | | 39739.1, AD-39774.1, AD-39762.1, AD- |
| | | | | 39733.1, AD-39768.1, AD-39750.1 |
| GAAUCAUUUUGU | 2014 | ACAAAAUGAUUC | 2015 | AD-39745.1, AD-39756.1, AD- |
| | | | | 39739.1, AD-39774.1, AD-39762.1, AD- |
| | | | | 39733.1, AD-39768.1, AD-39751.1 |
| AAUCAUUUUGUG | 2016 | CACAAAAUGAUU | 2017 | AD-39745.1, AD-39739.1, AD- |
| | | | | 39774.1, AD-39757.1, AD-39762.1, AD- |
| | | | | 39733.1, AD-39768.1, AD-39751.1 |
| AUCAUUUUGUGG | 2018 | CCACAAAAUGAU | 2019 | AD-39745.1, AD-39739.1, AD- |
| | | | | 39774.1, AD-39757.1, AD-39733.1, AD- |
| | | | | 39768.1, AD-39751.1, AD-39763.1 |
| UCAUUUUGUGGA | 2020 | UCCACAAAAUGA | 2021 | AD-39745.1, AD-39739.1, AD- |
| | | | | 39774.1, AD-39757.1, AD-39733.1, AD- |
| | | | | 39751.1, AD-39769.1, AD-39763.1 |
| CAUUUUGUGGAC | 2022 | GUCCACAAAAUG | 2023 | AD-39745.1, AD-39739.1, AD- |
| | | | | 39775.1, AD-39757.1, AD-39733.1, AD- |
| | | | | 39751.1, AD-39769.1, AD-39763.1 |
| AUUUUGUGGACG | 2024 | CGUCCACAAAAU | 2025 | AD-39745.1, AD-39739.1, AD- |
| | | | | 39775.1, AD-39757.1, AD-39751.1, AD- |
| | | | | 39769.1, AD-39763.1, AD-39734.1 |
| UUUUGUGGACGA | 2026 | UCGUCCACAAAA | 2027 | AD-39745.1, AD-39775.1, AD- |
| | | | | 39757.1, AD-39751.1, AD-39769.1, AD- |
| | | | | 39740.1, AD-39763.1, AD-39734.1 |
| UUUGUGGACGAA | 2028 | UUCGUCCACAAA | 2029 | AD-39775.1, AD-39746.1, AD- |
| | | | | 39757.1, AD-39751.1, AD-39769.1, AD- |
| | | | | 39740.1, AD-39763.1, AD-39734.1 |
| UUGUGGACGAAU | 2030 | AUUCGUCCACAA | 2031 | AD-39752.1, AD-39775.1, AD- |
| | | | | 39746.1, AD-39757.1, AD-39769.1, AD- |
| | | | | 39740.1, AD-39763.1, AD-39734.1 |
| UGUGGACGAAUA | 2032 | UAUUCGUCCACA | 2033 | AD-39752.1, AD-39775.1, AD- |
| | | | | 39746.1, AD-39758.1, AD-39769.1, AD- |
| | | | | 39740.1, AD-39763.1, AD-39734.1 |
| GUGGACGAAUAU | 2034 | AUAUUCGUCCAC | 2035 | AD-39752.1, AD-39775.1, AD- |
| | | | | 39764.1, AD-39746.1, AD-39758.1, AD- |
| | | | | 39769.1, AD-39740.1, AD-39734.1 |
| UGGACGAAUAUG | 2036 | CAUAUUCGUCCA | 2037 | AD-39752.1, AD-39775.1, AD- |
| | | | | 39764.1, AD-39746.1, AD-39770.1, AD- |
| | | | | 39758.1, AD-39740.1, AD-39734.1 |
| GGACGAAUAUGA | 2038 | UCAUAUUCGUCC | 2039 | AD-39752.1, AD-35523.3, AD- |
| | | | | 39764.1, AD-39746.1, AD-39770.1, AD- |
| | | | | 39758.1, AD-39740.1, AD-39734.1 |
| GACGAAUAUGAU | 2040 | AUCAUAUUCGUC | 2041 | AD-39752.1, AD-35529.1, AD- |
| | | | | 35523.3, AD-39764.1, AD-39746.1, AD- |
| | | | | 39770.1, AD-39758.1, AD-39740.1 |
| ACGAAUAUGAUC | 2042 | GAUCAUAUUCGU | 2043 | AD-39752.1, AD-35529.1, AD- |
| | | | | 35523.3, AD-39764.1, AD-39746.1, AD- |
| | | | | 35535.4, AD-39770.1, AD-39758.1 |
| CGAAUAUGAUCC | 2044 | GGAUCAUAUUCG | 2045 | AD-39752.1, AD-35529.1, AD- |
| | | | | 35523.3, AD-35541.4, AD-39764.1, AD- |
| | | | | 35535.4, AD-39770.1, AD-39758.1 |
| GAAUAUGAUCCA | 2046 | UGGAUCAUAUUC | 2047 | AD-35529.1, AD-35523.3, AD- |
| | | | | 35541.4, AD-39764.1, AD-35535.4, AD- |
| | | | | 39770.1, AD-39758.1, AD-35547.4 |
| AAUAUGAUCCAA | 2048 | UUGGAUCAUAUU | 2049 | AD-35529.1, AD-35523.3, AD- |
| | | | | 35541.4, AD-39764.1, AD-35535.4, AD- |
| | | | | 39770.1, AD-35553.4, AD-35547.4 |
| AUAUGAUCCAAC | 2050 | GUUGGAUCAUAU | 2051 | AD-35529.1, AD-35523.3, AD- |
| | | | | 35541.4, AD-35559.4, AD-35535.4, AD- |
| | | | | 39770.1, AD-35553.4, AD-35547.4 |
| UAUGAUCCAACA | 2052 | UGUUGGAUCAUA | 2053 | AD-35529.1, AD-35523.3, AD- |
| | | | | 35541.4, AD-35565.4, AD-35559.4, AD- |
| | | | | 35535.4, AD-35553.4, AD-35547.4 |
| AUGAUCCAACAA | 2054 | UUGUUGGAUCAU | 2055 | AD-35529.1, AD-35541.4, AD- |
| | | | | 35565.4, AD-35559.4, AD-35535.4, AD- |
| | | | | 35553.4, AD-35547.4, AD-35524.4 |
| UGAUCCAACAAU | 2056 | AUUGUUGGAUCA | 2057 | AD-35530.4, AD-35541.4, AD- |
| | | | | 35565.4, AD-35559.4, AD-35535.4, AD- |
| | | | | 35553.4, AD-35547.4, AD-35524.4 |
| GAUCCAACAAUA | 2058 | UAUUGUUGGAUC | 2059 | AD-35530.4, AD-35541.4, AD- |
| | | | | 35565.4, AD-35559.4, AD-35553.4, AD- |
| | | | | 35536.4, AD-35547.4, AD-35524.4 |
| AUCCAACAAUAG | 2060 | CUAUUGUUGGAU | 2061 | AD-35530.4, AD-35565.4, AD- |
| | | | | 35559.4, AD-35553.4, AD-35542.4, AD- |
| | | | | 35536.4, AD-35547.4, AD-35524.4 |
| UCCAACAAUAGA | 2062 | UCUAUUGUUGGA | 2063 | AD-35530.4, AD-35565.4, AD- |
| | | | | 35559.4, AD-35553.4, AD-35548.4, AD- |
| | | | | 35542.4, AD-35536.4, AD-35524.4 |
| CCAACAAUAGAG | 2064 | CUCUAUUGUUGG | 2065 | AD-35554.4, AD-35530.4, AD- |
| | | | | 35565.4, AD-35559.4, AD-35548.4, AD- |
| | | | | 35542.4, AD-35536.4, AD-35524.4 |
| CAACAAUAGAGG | 2066 | CCUCUAUUGUUG | 2067 | AD-35554.4, AD-35530.4, AD- |
| | | | | 35565.4, AD-35548.4, AD-35542.4, AD- |
| | | | | 35536.4, AD-35560.2, AD-35524.4 |
| AACAAUAGAGGA | 2068 | UCCUCUAUUGUU | 2069 | AD-35554.4, AD-35530.4, AD- |
| | | | | 35566.4, AD-35548.4, AD-35542.4, AD- |
| | | | | 35536.4, AD-35560.2, AD-35524.4 |
| ACAAUAGAGGAU | 2070 | AUCCUCUAUUGU | 2071 | AD-35554.4, AD-35530.4, AD- |
| | | | | 35525.2, AD-35566.4, AD-35548.4, AD- |
| | | | | 35542.4, AD-35536.4, AD-35560.2 |
| CAAUAGAGGAUU | 2072 | AAUCCUCUAUUG | 2073 | AD-35554.4, AD-35525.2, AD- |
| | | | | 35566.4, AD-35548.4, AD-35542.4, AD- |
| | | | | 35536.4, AD-35531.4, AD-35560.2 |
| AAUAGAGGAUUC | 2074 | GAAUCCUCUAUU | 2075 | AD-35554.4, AD-35525.2, AD- |
| | | | | 35537.4, AD-35566.4, AD-35548.4, AD- |
| | | | | 35542.4, AD-35531.4, AD-35560.2 |
| AUAGAGGAUUCC | 2076 | GGAAUCCUCUAU | 2077 | AD-35554.4, AD-35525.2, AD- |
| | | | | 35537.4, AD-35566.4, AD-35548.4, AD- |
| | | | | 35531.4, AD-35560.2, AD-35543.2 |
| UAGAGGAUUCCU | 2078 | AGGAAUCCUCUA | 2079 | AD-35549.4, AD-35554.4, AD- |
| | | | | 35525.2, AD-35537.4, AD-35566.4, AD- |
| | | | | 35531.4, AD-35560.2, AD-35543.2 |
| AGAGGAUUCCUA | 2080 | UAGGAAUCCUCU | 2081 | AD-35549.4, AD-35555.4, AD- |
| | | | | 35525.2, AD-35537.4, AD-35566.4, AD- |
| | | | | 35531.4, AD-35560.2, AD-35543.2 |
| GAGGAUUCCUAC | 2082 | GUAGGAAUCCUC | 2083 | AD-35549.4, AD-35555.4, AD- |
| | | | | 35525.2, AD-35537.4, AD-35566.4, AD- |
| | | | | 35531.4, AD-35561.4, AD-35543.2 |
| AGGAUUCCUACA | 2084 | UGUAGGAAUCCU | 2085 | AD-35549.4, AD-35555.4, AD- |
| | | | | 35525.2, AD-35537.4, AD-35531.4, AD- |
| | | | | 35561.4, AD-35543.2, AD-35567.4 |
| GGAUUCCUACAG | 2086 | CUGUAGGAAUCC | 2087 | AD-35549.4, AD-35555.4, AD- |
| | | | | 35526.4, AD-35537.4, AD-35531.4, AD- |
| | | | | 35561.4, AD-35543.2, AD-35567.4 |
| GAUUCCUACAGG | 2088 | CCUGUAGGAAUC | 2089 | AD-35549.4, AD-35555.4, AD- |
| | | | | 35532.4, AD-35526.4, AD-35537.4, AD- |
| | | | | 35561.4, AD-35543.2, AD-35567.4 |
| AUUCCUACAGGA | 2090 | UCCUGUAGGAAU | 2091 | AD-35549.4, AD-35555.4, AD- |
| | | | | 35532.4, AD-35526.4, AD-35538.4, AD- |
| | | | | 35561.4, AD-35543.2, AD-35567.4 |
| UUCCUACAGGAA | 2092 | UUCCUGUAGGAA | 2093 | AD-35549.4, AD-35555.4, AD- |
| | | | | 35532.4, AD-35526.4, AD-35538.4, AD- |
| | | | | 35544.4, AD-35561.4, AD-35567.4 |
| UCCUACAGGAAG | 2094 | CUUCCUGUAGGA | 2095 | AD-35555.4, AD-35532.4, AD- |
| | | | | 35526.4, AD-35550.4, AD-35538.4, AD- |
| | | | | 35544.4, AD-35561.4, AD-35567.4 |
| CCUACAGGAAGC | 2096 | GCUUCCUGUAGG | 2097 | AD-35556.4, AD-35532.4, AD- |
| | | | | 35526.4, AD-35550.4, AD-35538.4, AD- |
| | | | | 35544.4, AD-35561.4, AD-35567.4 |
| CUACAGGAAGCA | 2098 | UGCUUCCUGUAG | 2099 | AD-35562.4, AD-35556.4, AD- |
| | | | | 35532.4, AD-35526.4, AD-35550.4, AD- |
| | | | | 35538.4, AD-35544.4, AD-35567.4 |
| UACAGGAAGCAA | 2100 | UUGCUUCCUGUA | 2101 | AD-35562.4, AD-35556.4, AD- |
| | | | | 35532.4, AD-35526.4, AD-35550.4, AD- |
| | | | | 35568.4, AD-35538.4, AD-35544.4 |
| ACAGGAAGCAAG | 2102 | CUUGCUUCCUGU | 2103 | AD-35562.4, AD-35556.4, AD- |
| | | | | 35532.4, AD-35550.4, AD-35568.4, AD- |
| | | | | 35538.4, AD-35544.4, AD-35527.4 |
| CAGGAAGCAAGU | 2104 | ACUUGCUUCCUG | 2105 | AD-35562.4, AD-35556.4, AD- |
| | | | | 35550.4, AD-35568.4, AD-35538.4, AD- |
| | | | | 35544.4, AD-35533.4, AD-35527.4 |
| AGGAAGCAAGUA | 2106 | UACUUGCUUCCU | 2107 | AD-35562.4, AD-35556.4, AD- |
| | | | | 35550.4, AD-39776.1, AD-35568.4, AD- |
| | | | | 35544.4, AD-35533.4, AD-35527.4 |
| GGAAGCAAGUAG | 2108 | CUACUUGCUUCC | 2109 | AD-35562.4, AD-39735.1, AD- |
| | | | | 35556.4, AD-35550.4, AD-39776.1, AD- |
| | | | | 35568.4, AD-35533.4, AD-35527.4 |
| GAAGCAAGUAGU | 2110 | ACUACUUGCUUC | 2111 | AD-35562.4, AD-39735.1, AD- |
| | | | | 35556.4, AD-39776.1, AD-35568.4, AD- |
| | | | | 35533.4, AD-35527.4, AD-39741.1 |
| AAGCAAGUAGUA | 2112 | UACUACUUGCUU | 2113 | AD-35562.4, AD-39735.1, AD- |
| | | | | 39776.1, AD-35568.4, AD-39747.1, AD- |
| | | | | 35533.4, AD-35527.4, AD-39741.1 |
| AGCAAGUAGUAA | 2114 | UUACUACUUGCU | 2115 | AD-39735.1, AD-39753.1, AD- |
| | | | | 39776.1, AD-35568.4, AD-39747.1, AD- |
| | | | | 35533.4, AD-35527.4, AD-39741.1 |
| GCAAGUAGUAAU | 2116 | AUUACUACUUGC | 2117 | AD-39735.1, AD-39759.1, AD- |
| | | | | 39753.1, AD-39776.1, AD-39747.1, AD- |
| | | | | 35533.4, AD-35527.4, AD-39741.1 |
| CAAGUAGUAAUU | 2118 | AAUUACUACUUG | 2119 | AD-39735.1, AD-39759.1, AD- |
| | | | | 39753.1, AD-39776.1, AD-39747.1, AD- |
| | | | | 35533.4, AD-39765.1, AD-39741.1 |
| AAGUAGUAAUUG | 2120 | CAAUUACUACUU | 2121 | AD-39735.1, AD-39771.1, AD- |
| | | | | 39759.1, AD-39753.1, AD-39776.1, AD- |
| | | | | 39747.1, AD-39765.1, AD-39741.1 |
| AGUAGUAAUUGA | 2122 | UCAAUUACUACU | 2123 | AD-39735.1, AD-39778.1, AD- |
| | | | | 39771.1, AD-39759.1, AD-39753.1, AD- |
| | | | | 39747.1, AD-39765.1, AD-39741.1 |
| GUAGUAAUUGAU | 2124 | AUCAAUUACUAC | 2125 | AD-39784.1, AD-39778.1, AD- |
| | | | | 39771.1, AD-39759.1, AD-39753.1, AD- |
| | | | | 39747.1, AD-39765.1, AD-39741.1 |
| UAGUAAUUGAUG | 2126 | CAUCAAUUACUA | 2127 | AD-39784.1, AD-39778.1, AD- |
| | | | | 39771.1, AD-39759.1, AD-39753.1, AD- |
| | | | | 39747.1, AD-39765.1, AD-39790.1 |
| AGUAAUUGAUGG | 2128 | CCAUCAAUUACU | 2129 | AD-39784.1, AD-39778.1, AD- |
| | | | | 39771.1, AD-39759.1, AD-39753.1, AD- |
| | | | | 39796.1, AD-39765.1, AD-39790.1 |
| GUAAUUGAUGGA | 2130 | UCCAUCAAUUAC | 2131 | AD-39784.1, AD-39778.1, AD- |
| | | | | 39771.1, AD-39759.1, AD-39796.1, AD- |
| | | | | 39765.1, AD-39802.1, AD-39790.1 |
| UAAUUGAUGGAG | 2132 | CUCCAUCAAUUA | 2133 | AD-39784.1, AD-39778.1, AD- |
| | | | | 39808.1, AD-39771.1, AD-39796.1, AD- |
| | | | | 39765.1, AD-39802.1, AD-39790.1 |
| AAUUGAUGGAGA | 2134 | UCUCCAUCAAUU | 2135 | AD-39784.1, AD-39814.1, AD- |
| | | | | 39778.1, AD-39808.1, AD-39771.1, AD- |
| | | | | 39796.1, AD-39802.1, AD-39790.1 |
| AUUGAUGGAGAA | 2136 | UUCUCCAUCAAU | 2137 | AD-39784.1, AD-39814.1, AD- |
| | | | | 39778.1, AD-39808.1, AD-39820.1, AD- |
| | | | | 39796.1, AD-39802.1, AD-39790.1 |
| UUGAUGGAGAAA | 2138 | UUUCUCCAUCAA | 2139 | AD-39784.1, AD-39814.1, AD- |
| | | | | 39808.1, AD-39820.1, AD-39779.1, AD- |
| | | | | 39796.1, AD-39802.1, AD-39790.1 |
| UGAUGGAGAAAC | 2140 | GUUUCUCCAUCA | 2141 | AD-39814.1, AD-39808.1, AD- |
| | | | | 39785.1, AD-39820.1, AD-39779.1, AD- |
| | | | | 39796.1, AD-39802.1, AD-39790.1 |
| GAUGGAGAAACC | 2142 | GGUUUCUCCAUC | 2143 | AD-39791.1, AD-39814.1, AD- |
| | | | | 39808.1, AD-39785.1, AD-39820.1, AD- |
| | | | | 39779.1, AD-39796.1, AD-39802.1 |
| AUGGAGAAACCU | 2144 | AGGUUUCUCCAU | 2145 | AD-39791.1, AD-39814.1, AD- |
| | | | | 39808.1, AD-39785.1, AD-39820.1, AD- |
| | | | | 39779.1, AD-39797.1, AD-39802.1 |
| UGGAGAAACCUG | 2146 | CAGGUUUCUCCA | 2147 | AD-39791.1, AD-39814.1, AD- |
| | | | | 39808.1, AD-39803.1, AD-39785.1, AD- |
| | | | | 39820.1, AD-39779.1, AD-39797.1 |
| GGAGAAACCUGU | 2148 | ACAGGUUUCUCC | 2149 | AD-39791.1, AD-39814.1, AD- |
| | | | | 39803.1, AD-39785.1, AD-39820.1, AD- |
| | | | | 39809.1, AD-39779.1, AD-39797.1 |
| GAGAAACCUGUC | 2150 | GACAGGUUUCUC | 2151 | AD-39815.1, AD-39791.1, AD- |
| | | | | 39803.1, AD-39785.1, AD-39820.1, AD- |
| | | | | 39809.1, AD-39779.1, AD-39797.1 |
| AGAAACCUGUCU | 2152 | AGACAGGUUUCU | 2153 | AD-39815.1, AD-39791.1, AD- |
| | | | | 39803.1, AD-39821.1, AD-39785.1, AD- |
| | | | | 39809.1, AD-39779.1, AD-39797.1 |
| GAAACCUGUCUC | 2154 | GAGACAGGUUUC | 2155 | AD-39815.1, AD-39791.1, AD- |
| | | | | 39803.1, AD-39821.1, AD-39785.1, AD- |
| | | | | 39809.1, AD-39780.1, AD-39797.1 |
| AAACCUGUCUCU | 2156 | AGAGACAGGUUU | 2157 | AD-39815.1, AD-39791.1, AD- |
| | | | | 39803.1, AD-39821.1, AD-39809.1, AD- |
| | | | | 39780.1, AD-39797.1, AD-39786.1 |
| AACCUGUCUCUU | 2158 | AAGAGACAGGUU | 2159 | AD-39815.1, AD-39803.1, AD- |
| | | | | 39821.1, AD-39809.1, AD-39792.1, AD- |
| | | | | 39780.1, AD-39797.1, AD-39786.1 |
| ACCUGUCUCUUG | 2160 | CAAGAGACAGGU | 2161 | AD-39815.1, AD-39803.1, AD- |
| | | | | 39821.1, AD-39809.1, AD-39792.1, AD- |
| | | | | 39780.1, AD-39798.1, AD-39786.1 |
| CCUGUCUCUUGG | 2162 | CCAAGAGACAGG | 2163 | AD-39815.1, AD-39821.1, AD- |
| | | | | 39809.1, AD-39792.1, AD-39804.1, AD- |
| | | | | 39780.1, AD-39798.1, AD-39786.1 |
| CUGUCUCUUGGA | 2164 | UCCAAGAGACAG | 2165 | AD-39815.1, AD-39821.1, AD- |
| | | | | 39792.1, AD-39804.1, AD-39810.1, AD- |
| | | | | 39780.1, AD-39798.1, AD-39786.1 |
| UGUCUCUUGGAU | 2166 | AUCCAAGAGACA | 2167 | AD-39816.1, AD-39821.1, AD- |
| | | | | 39792.1, AD-39804.1, AD-39810.1, AD- |
| | | | | 39780.1, AD-39798.1, AD-39786.1 |
| GUCUCUUGGAUA | 2168 | UAUCCAAGAGAC | 2169 | AD-39816.1, AD-39792.1, AD- |
| | | | | 39804.1, AD-39810.1, AD-39780.1, AD- |
| | | | | 39822.1, AD-39798.1, AD-39786.1 |
| UCUCUUGGAUAU | 2170 | AUAUCCAAGAGA | 2171 | AD-39816.1, AD-39792.1, AD- |
| | | | | 39804.1, AD-39810.1, AD-39781.1, AD- |
| | | | | 39822.1, AD-39798.1, AD-39786.1 |
| CUCUUGGAUAUU | 2172 | AAUAUCCAAGAG | 2173 | AD-39816.1, AD-39792.1, AD- |
| | | | | 39804.1, AD-39787.1, AD-39810.1, AD- |
| | | | | 39781.1, AD-39822.1, AD-39798.1 |
| UCUUGGAUAUUC | 2174 | GAAUAUCCAAGA | 2175 | AD-39816.1, AD-39793.1, AD- |
| | | | | 39804.1, AD-39787.1, AD-39810.1, AD- |
| | | | | 39781.1, AD-39822.1, AD-39798.1 |
| CUUGGAUAUUCU | 2176 | AGAAUAUCCAAG | 2177 | AD-39799.1, AD-39816.1, AD- |
| | | | | 39793.1, AD-39804.1, AD-39787.1, AD- |
| | | | | 39810.1, AD-39781.1, AD-39822.1 |
| UUGGAUAUUCUC | 2178 | GAGAAUAUCCAA | 2179 | AD-39799.1, AD-39816.1, AD- |
| | | | | 39793.1, AD-39787.1, AD-35539.4, AD- |
| | | | | 39810.1, AD-39781.1, AD-39822.1 |
| UGGAUAUUCUCG | 2180 | CGAGAAUAUCCA | 2181 | AD-39799.1, AD-39816.1, AD- |
| | | | | 39793.1, AD-39787.1, AD-35539.4, AD- |
| | | | | 35545.4, AD-39781.1, AD-39822.1 |
| GGAUAUUCUCGA | 2182 | UCGAGAAUAUCC | 2183 | AD-39799.1, AD-35551.4, AD- |
| | | | | 39793.1, AD-39787.1, AD-35539.4, AD- |
| | | | | 35545.4, AD-39781.1, AD-39822.1 |
| GAUAUUCUCGAC | 2184 | GUCGAGAAUAUC | 2185 | AD-39799.1, AD-35551.4, AD- |
| | | | | 39793.1, AD-35557.1, AD-39787.1, AD- |
| | | | | 35539.4, AD-35545.4, AD-39781.1 |
| AUAUUCUCGACA | 2186 | UGUCGAGAAUAU | 2187 | AD-39799.1, AD-35551.4, AD- |
| | | | | 39793.1, AD-35557.1, AD-39787.1, AD- |
| | | | | 35539.4, AD-35545.4, AD-35563.4 |
| UAUUCUCGACAC | 2188 | GUGUCGAGAAUA | 2189 | AD-39799.1, AD-35551.4, AD- |
| | | | | 39793.1, AD-35557.1, AD-35539.4, AD- |
| | | | | 35545.4, AD-35569.1, AD-35563.4 |
| AUUCUCGACACA | 2190 | UGUGUCGAGAAU | 2191 | AD-39799.1, AD-35528.4, AD- |
| | | | | 35551.4, AD-35557.1, AD-35539.4, AD- |
| | | | | 35545.4, AD-35569.1, AD-35563.4 |
| UUCUCGACACAG | 2192 | CUGUGUCGAGAA | 2193 | AD-35528.4, AD-35551.4, AD- |
| | | | | 35557.1, AD-35539.4, AD-35534.1, AD- |
| | | | | 35545.4, AD-35569.1, AD-35563.4 |
| UCUCGACACAGC | 2194 | GCUGUGUCGAGA | 2195 | AD-35528.4, AD-35551.4, AD- |
| | | | | 35557.1, AD-35540.4, AD-35534.1, AD- |
| | | | | 35545.4, AD-35569.1, AD-35563.4 |
| CUCGACACAGCA | 2196 | UGCUGUGUCGAG | 2197 | AD-35528.4, AD-35551.4, AD- |
| | | | | 35546.4, AD-35557.1, AD-35540.4, AD- |
| | | | | 35534.1, AD-35569.1, AD-35563.4 |
| UCGACACAGCAG | 2198 | CUGCUGUGUCGA | 2199 | AD-35552.4, AD-35528.4, AD- |
| | | | | 35546.4, AD-35557.1, AD-35540.4, AD- |
| | | | | 35534.1, AD-35569.1, AD-35563.4 |
| CGACACAGCAGG | 2200 | CCUGCUGUGUCG | 2201 | AD-35552.4, AD-35528.4, AD- |
| | | | | 35558.4, AD-35546.4, AD-35540.4, AD- |
| | | | | 35534.1, AD-35569.1, AD-35563.4 |
| GACACAGCAGGU | 2202 | ACCUGCUGUGUC | 2203 | AD-35552.4, AD-35528.4, AD- |
| | | | | 35558.4, AD-35546.4, AD-35540.4, AD- |
| | | | | 35534.1, AD-35564.4, AD-35569.1 |
| ACACAGCAGGUC | 2204 | GACCUGCUGUGU | 2205 | AD-35552.4, AD-35528.4, AD- |
| | | | | 35558.4, AD-35546.4, AD-35540.4, AD- |
| | | | | 35570.4, AD-35534.1, AD-35564.4 |
| CACAGCAGGUCA | 2206 | UGACCUGCUGUG | 2207 | AD-35552.4, AD-35558.4, AD- |
| | | | | 35546.4, AD-35540.4, AD-35570.4, AD- |
| | | | | 35534.1, AD-35564.4, AD-35571.4 |
| ACAGCAGGUCAA | 2208 | UUGACCUGCUGU | 2209 | AD-35577.4, AD-35552.4, AD- |
| | | | | 35558.4, AD-35546.4, AD-35540.4, AD- |
| | | | | 35570.4, AD-35564.4, AD-35571.4 |
| CAGCAGGUCAAG | 2210 | CUUGACCUGCUG | 2211 | AD-35577.4, AD-35552.4, AD- |
| | | | | 35558.4, AD-35546.4, AD-35583.4, AD- |
| | | | | 35570.4, AD-35564.4, AD-35571.4 |
| AGCAGGUCAAGA | 2212 | UCUUGACCUGCU | 2213 | AD-35577.4, AD-35552.4, AD- |
| | | | | 35558.4, AD-35583.4, AD-35570.4, AD- |
| | | | | 35564.4, AD-35589.4, AD-35571.4 |
| GCAGGUCAAGAG | 2214 | CUCUUGACCUGC | 2215 | AD-35577.4, AD-35595.4, AD- |
| | | | | 35558.4, AD-35583.4, AD-35570.4, AD- |
| | | | | 35564.4, AD-35589.4, AD-35571.4 |
| CAGGUCAAGAGG | 2216 | CCUCUUGACCUG | 2217 | AD-35577.4, AD-35595.4, AD- |
| | | | | 35583.4, AD-35570.4, AD-35564.4, AD- |
| | | | | 35589.4, AD-35571.4, AD-35601.4 |
| AGGUCAAGAGGA | 2218 | UCCUCUUGACCU | 2219 | AD-35577.4, AD-35595.4, AD- |
| | | | | 35583.4, AD-35570.4, AD-35589.4, AD- |
| | | | | 35607.4, AD-35571.4, AD-35601.4 |
| GGUCAAGAGGAG | 2220 | CUCCUCUUGACC | 2221 | AD-35577.4, AD-35595.4, AD- |
| | | | | 35583.4, AD-35589.4, AD-35607.4, AD- |
| | | | | 35571.4, AD-35613.4, AD-35601.4 |
| GUCAAGAGGAGU | 2222 | ACUCCUCUUGAC | 2223 | AD-35577.4, AD-35595.4, AD- |
| | | | | 35583.4, AD-35572.4, AD-35589.4, AD- |
| | | | | 35607.4, AD-35613.4, AD-35601.4 |
| UCAAGAGGAGUA | 2224 | UACUCCUCUUGA | 2225 | AD-35595.4, AD-35583.4, AD- |
| | | | | 35578.4, AD-35572.4, AD-35589.4, AD- |
| | | | | 35607.4, AD-35613.4, AD-35601.4 |
| CAAGAGGAGUAC | 2226 | GUACUCCUCUUG | 2227 | AD-35595.4, AD-35578.4, AD- |
| | | | | 35572.4, AD-35584.4, AD-35589.4, AD- |
| | | | | 35607.4, AD-35613.4, AD-35601.4 |
| AAGAGGAGUACA | 2228 | UGUACUCCUCUU | 2229 | AD-35590.4, AD-35595.4, AD- |
| | | | | 35578.4, AD-35572.4, AD-35584.4, AD- |
| | | | | 35607.4, AD-35613.4, AD-35601.4 |
| AGAGGAGUACAG | 2230 | CUGUACUCCUCU | 2231 | AD-35596.4, AD-35590.4, AD- |
| | | | | 35578.4, AD-35572.4, AD-35584.4, AD- |
| | | | | 35607.4, AD-35613.4, AD-35601.4 |
| GAGGAGUACAGU | 2232 | ACUGUACUCCUC | 2233 | AD-35596.4, AD-35590.4, AD- |
| | | | | 35578.4, AD-35572.4, AD-35602.4, AD- |
| | | | | 35584.4, AD-35607.4, AD-35613.4 |
| AGGAGUACAGUG | 2234 | CACUGUACUCCU | 2235 | AD-35608.4, AD-35596.4, AD- |
| | | | | 35590.4, AD-35578.4, AD-35572.4, AD- |
| | | | | 35602.4, AD-35584.4, AD-35613.4 |
| GGAGUACAGUGC | 2236 | GCACUGUACUCC | 2237 | AD-35608.4, AD-35596.4, AD- |
| | | | | 35590.4, AD-35578.4, AD-35572.4, AD- |
| | | | | 35614.4, AD-35602.4, AD-35584.4 |
| GAGUACAGUGCA | 2238 | UGCACUGUACUC | 2239 | AD-35608.4, AD-35596.4, AD- |
| | | | | 35590.4, AD-35578.4, AD-35614.4, AD- |
| | | | | 35602.4, AD-35584.4, AD-35573.4 |
| AGUACAGUGCAA | 2240 | UUGCACUGUACU | 2241 | AD-39805.1, AD-35608.4, AD- |
| | | | | 35596.4, AD-35590.4, AD-35614.4, AD- |
| | | | | 35602.4, AD-35584.4, AD-35573.4 |
| GUACAGUGCAAU | 2242 | AUUGCACUGUAC | 2243 | AD-39805.1, AD-35608.4, AD- |
| | | | | 35596.4, AD-35590.4, AD-39811.1, AD- |
| | | | | 35614.4, AD-35602.4, AD-35573.4 |
| UACAGUGCAAUG | 2244 | CAUUGCACUGUA | 2245 | AD-39805.1, AD-35608.4, AD- |
| | | | | 35596.4, AD-39817.1, AD-39811.1, AD- |
| | | | | 35614.4, AD-35602.4, AD-35573.4 |
| ACAGUGCAAUGA | 2246 | UCAUUGCACUGU | 2247 | AD-39805.1, AD-35608.4, AD- |
| | | | | 39823.1, AD-39817.1, AD-39811.1, AD- |
| | | | | 35614.4, AD-35602.4, AD-35573.4 |
| CAGUGCAAUGAG | 2248 | CUCAUUGCACUG | 2249 | AD-39805.1, AD-35608.4, AD- |
| | | | | 39823.1, AD-39817.1, AD-39811.1, AD- |
| | | | | 35614.4, AD-35573.4, AD-39782.1 |
| AGUGCAAUGAGG | 2250 | CCUCAUUGCACU | 2251 | AD-39805.1, AD-39823.1, AD- |
| | | | | 39817.1, AD-39788.1, AD-39811.1, AD- |
| | | | | 35614.4, AD-35573.4, AD-39782.1 |
| GUGCAAUGAGGG | 2252 | CCCUCAUUGCAC | 2253 | AD-39805.1, AD-39823.1, AD- |
| | | | | 39817.1, AD-39788.1, AD-39811.1, AD- |
| | | | | 35573.4, AD-39782.1, AD-39794.1 |
| UGCAAUGAGGGA | 2254 | UCCCUCAUUGCA | 2255 | AD-39805.1, AD-39823.1, AD- |
| | | | | 39817.1, AD-39788.1, AD-39811.1, AD- |
| | | | | 39782.1, AD-39794.1, AD-39800.1 |
| GCAAUGAGGGAC | 2256 | GUCCCUCAUUGC | 2257 | AD-39806.1, AD-39823.1, AD- |
| | | | | 39817.1, AD-39788.1, AD-39811.1, AD- |
| | | | | 39782.1, AD-39794.1, AD-39800.1 |
| CAAUGAGGGACC | 2258 | GGUCCCUCAUUG | 2259 | AD-39806.1, AD-39823.1, AD- |
| | | | | 39812.1, AD-39817.1, AD-39788.1, AD- |
| | | | | 39782.1, AD-39794.1, AD-39800.1 |
| AAUGAGGGACCA | 2260 | UGGUCCCUCAUU | 2261 | AD-39806.1, AD-39823.1, AD- |
| | | | | 39812.1, AD-39788.1, AD-39782.1, AD- |
| | | | | 39794.1, AD-39818.1, AD-39800.1 |
| AUGAGGGACCAG | 2262 | CUGGUCCCUCAU | 2263 | AD-39806.1, AD-39812.1, AD- |
| | | | | 39788.1, AD-39824.1, AD-39782.1, AD- |
| | | | | 39794.1, AD-39818.1, AD-39800.1 |
| UGAGGGACCAGU | 2264 | ACUGGUCCCUCA | 2265 | AD-39806.1, AD-39812.1, AD- |
| | | | | 39788.1, AD-39824.1, AD-39783.1, AD- |
| | | | | 39794.1, AD-39818.1, AD-39800.1 |
| GAGGGACCAGUA | 2266 | UACUGGUCCCUC | 2267 | AD-39789.1, AD-39806.1, AD- |
| | | | | 39812.1, AD-39824.1, AD-39783.1, AD- |
| | | | | 39794.1, AD-39818.1, AD-39800.1 |
| AGGGACCAGUAC | 2268 | GUACUGGUCCCU | 2269 | AD-39789.1, AD-39806.1, AD- |
| | | | | 39812.1, AD-39824.1, AD-39795.1, AD- |
| | | | | 39783.1, AD-39818.1, AD-39800.1 |
| GGGACCAGUACA | 2270 | UGUACUGGUCCC | 2271 | AD-39789.1, AD-39806.1, AD- |
| | | | | 39812.1, AD-39824.1, AD-39795.1, AD- |
| | | | | 39783.1, AD-39801.1, AD-39818.1 |
| GGACCAGUACAU | 2272 | AUGUACUGGUCC | 2273 | AD-39789.1, AD-39807.1, AD- |
| | | | | 39812.1, AD-39824.1, AD-39795.1, AD- |
| | | | | 39783.1, AD-39801.1, AD-39818.1 |
| GACCAGUACAUG | 2274 | CAUGUACUGGUC | 2275 | AD-39789.1, AD-39807.1, AD- |
| | | | | 39824.1, AD-39795.1, AD-39783.1, AD- |
| | | | | 39801.1, AD-39813.1, AD-39818.1 |
| ACCAGUACAUGA | 2276 | UCAUGUACUGGU | 2277 | AD-39789.1, AD-39807.1, AD- |
| | | | | 39824.1, AD-39795.1, AD-39783.1, AD- |
| | | | | 39801.1, AD-39813.1, AD-39819.1 |
| CCAGUACAUGAG | 2278 | CUCAUGUACUGG | 2279 | AD-39789.1, AD-39807.1, AD- |
| | | | | 39795.1, AD-39783.1, AD-39801.1, AD- |
| | | | | 39813.1, AD-39825.1, AD-39819.1 |
| CAGUACAUGAGG | 2280 | CCUCAUGUACUG | 2281 | AD-39789.1, AD-39807.1, AD- |
| | | | | 39795.1, AD-39801.1, AD-39813.1, AD- |
| | | | | 39825.1, AD-39831.1, AD-39819.1 |
| AGUACAUGAGGA | 2282 | UCCUCAUGUACU | 2283 | AD-39807.1, AD-39837.1, AD- |
| | | | | 39795.1, AD-39801.1, AD-39813.1, AD- |
| | | | | 39825.1, AD-39831.1, AD-39819.1 |
| GUACAUGAGGAC | 2284 | GUCCUCAUGUAC | 2285 | AD-39807.1, AD-39837.1, AD- |
| | | | | 39843.1, AD-39801.1, AD-39813.1, AD- |
| | | | | 39825.1, AD-39831.1, AD-39819.1 |
| UACAUGAGGACU | 2286 | AGUCCUCAUGUA | 2287 | AD-39807.1, AD-39837.1, AD- |
| | | | | 39843.1, AD-39813.1, AD-39825.1, AD- |
| | | | | 39831.1, AD-39849.1, AD-39819.1 |
| ACAUGAGGACUG | 2288 | CAGUCCUCAUGU | 2289 | AD-39837.1, AD-39843.1, AD- |
| | | | | 39813.1, AD-39825.1, AD-39855.1, AD- |
| | | | | 39831.1, AD-39849.1, AD-39819.1 |
| CAUGAGGACUGG | 2290 | CCAGUCCUCAUG | 2291 | AD-39861.1, AD-39837.1, AD- |
| | | | | 39843.1, AD-39825.1, AD-39855.1, AD- |
| | | | | 39831.1, AD-39849.1, AD-39819.1 |
| AUGAGGACUGGG | 2292 | CCCAGUCCUCAU | 2293 | AD-39861.1, AD-39837.1, AD- |
| | | | | 39843.1, AD-39825.1, AD-39855.1, AD- |
| | | | | 39831.1, AD-39867.1, AD-39849.1 |
| UGAGGACUGGGG | 2294 | CCCCAGUCCUCA | 2295 | AD-39861.1, AD-39837.1, AD- |
| | | | | 39843.1, AD-39826.1, AD-39855.1, AD- |
| | | | | 39831.1, AD-39867.1, AD-39849.1 |
| GAGGACUGGGGA | 2296 | UCCCCAGUCCUC | 2297 | AD-39861.1, AD-39832.1, AD- |
| | | | | 39837.1, AD-39843.1, AD-39826.1, AD- |
| | | | | 39855.1, AD-39867.1, AD-39849.1 |
| AGGACUGGGGAG | 2298 | CUCCCCAGUCCU | 2299 | AD-39861.1, AD-39832.1, AD- |
| | | | | 39843.1, AD-39826.1, AD-39855.1, AD- |
| | | | | 39867.1, AD-39849.1, AD-39838.1 |
| GGACUGGGGAGG | 2300 | CCUCCCCAGUCC | 2301 | AD-39844.1, AD-39861.1, AD- |
| | | | | 39832.1, AD-39826.1, AD-39855.1, AD- |
| | | | | 39867.1, AD-39849.1, AD-39838.1 |
| GACUGGGGAGGG | 2302 | CCCUCCCCAGUC | 2303 | AD-39850.1, AD-39844.1, AD- |
| | | | | 39861.1, AD-39832.1, AD-39826.1, AD- |
| | | | | 39855.1, AD-39867.1, AD-39838.1 |
| ACUGGGGAGGGC | 2304 | GCCCUCCCCAGU | 2305 | AD-39850.1, AD-39844.1, AD- |
| | | | | 39861.1, AD-39832.1, AD-39856.1, AD- |
| | | | | 39826.1, AD-39867.1, AD-39838.1 |
| CUGGGGAGGGCU | 2306 | AGCCCUCCCCAG | 2307 | AD-39850.1, AD-39844.1, AD- |
| | | | | 39862.1, AD-39832.1, AD-39856.1, AD- |
| | | | | 39826.1, AD-39867.1, AD-39838.1 |
| UGGGGAGGGCUU | 2308 | AAGCCCUCCCCA | 2309 | AD-39850.1, AD-39844.1, AD- |
| | | | | 39868.1, AD-39862.1, AD-39832.1, AD- |
| | | | | 39856.1, AD-39826.1, AD-39838.1 |
| GGGGAGGGCUUU | 2310 | AAAGCCCUCCCC | 2311 | AD-39850.1, AD-39844.1, AD- |
| | | | | 39868.1, AD-35579.4, AD-39862.1, AD- |
| | | | | 39832.1, AD-39856.1, AD-39838.1 |
| GGGAGGGCUUUC | 2312 | GAAAGCCCUCCC | 2313 | AD-35585.4, AD-39850.1, AD- |
| | | | | 39844.1, AD-39868.1, AD-35579.4, AD- |
| | | | | 39862.1, AD-39856.1, AD-39838.1 |
| GGAGGGCUUUCU | 2314 | AGAAAGCCCUCC | 2315 | AD-35585.4, AD-39850.1, AD- |
| | | | | 39844.1, AD-39868.1, AD-35579.4, AD- |
| | | | | 39862.1, AD-39856.1, AD-35591.4 |
| GAGGGCUUUCUU | 2316 | AAGAAAGCCCUC | 2317 | AD-35585.4, AD-39850.1, AD- |
| | | | | 39868.1, AD-35579.4, AD-39862.1, AD- |
| | | | | 35597.4, AD-39856.1, AD-35591.4 |
| AGGGCUUUCUUU | 2318 | AAAGAAAGCCCU | 2319 | AD-35585.4, AD-39868.1, AD- |
| | | | | 35579.4, AD-39862.1, AD-35597.4, AD- |
| | | | | 39856.1, AD-35591.4, AD-35603.4 |
| GGGCUUUCUUUG | 2320 | CAAAGAAAGCCC | 2321 | AD-35585.4, AD-39868.1, AD- |
| | | | | 35579.4, AD-39862.1, AD-35597.4, AD- |
| | | | | 35609.4, AD-35591.4, AD-35603.4 |
| GGCUUUCUUUGU | 2322 | ACAAAGAAAGCC | 2323 | AD-35585.4, AD-39868.1, AD- |
| | | | | 35579.4, AD-35615.4, AD-35597.4, AD- |
| | | | | 35609.4, AD-35591.4, AD-35603.4 |
| GCUUUCUUUGUG | 2324 | CACAAAGAAAGC | 2325 | AD-35585.4, AD-35579.4, AD- |
| | | | | 35615.4, AD-35597.4, AD-35609.4, AD- |
| | | | | 35591.4, AD-35603.4, AD-35574.4 |
| CUUUCUUUGUGU | 2326 | ACACAAAGAAAG | 2327 | AD-35585.4, AD-35615.4, AD- |
| | | | | 35597.4, AD-35609.4, AD-35591.4, AD- |
| | | | | 35603.4, AD-35580.1, AD-35574.4 |
| UUUCUUUGUGUA | 2328 | UACACAAAGAAA | 2329 | AD-35615.4, AD-35597.4, AD- |
| | | | | 35609.4, AD-35591.4, AD-35603.4, AD- |
| | | | | 35586.4, AD-35580.1, AD-35574.4 |
| UUCUUUGUGUAU | 2330 | AUACACAAAGAA | 2331 | AD-35615.4, AD-35597.4, AD- |
| | | | | 35609.4, AD-35592.4, AD-35603.4, AD- |
| | | | | 35586.4, AD-35580.1, AD-35574.4 |
| UCUUUGUGUAUU | 2332 | AAUACACAAAGA | 2333 | AD-35615.4, AD-35609.4, AD- |
| | | | | 35592.4, AD-35603.4, AD-35586.4, AD- |
| | | | | 35598.4, AD-35580.1, AD-35574.4 |
| CUUUGUGUAUUU | 2334 | AAAUACACAAAG | 2335 | AD-35604.4, AD-35615.4, AD- |
| | | | | 35609.4, AD-35592.4, AD-35586.4, AD- |
| | | | | 35598.4, AD-35580.1, AD-35574.4 |
| UUUGUGUAUUUG | 2336 | CAAAUACACAAA | 2337 | AD-35604.4, AD-35615.4, AD- |
| | | | | 35592.4, AD-35586.4, AD-35610.4, AD- |
| | | | | 35598.4, AD-35580.1, AD-35574.4 |
| UUGUGUAUUUGC | 2338 | GCAAAUACACAA | 2339 | AD-35604.4, AD-35592.4, AD- |
| | | | | 35586.4, AD-35610.4, AD-35598.4, AD- |
| | | | | 35616.4, AD-35580.1, AD-35574.4 |
| UGUGUAUUUGCC | 2340 | GGCAAAUACACA | 2341 | AD-35604.4, AD-35575.4, AD- |
| | | | | 35592.4, AD-35586.4, AD-35610.4, AD- |
| | | | | 35598.4, AD-35616.4, AD-35580.1 |
| GUGUAUUUGCCA | 2342 | UGGCAAAUACAC | 2343 | AD-35604.4, AD-35575.4, AD- |
| | | | | 35581.4, AD-35592.4, AD-35586.4, AD- |
| | | | | 35610.4, AD-35598.4, AD-35616.4 |
| UGUAUUUGCCAU | 2344 | AUGGCAAAUACA | 2345 | AD-35604.4, AD-35575.4, AD- |
| | | | | 35581.4, AD-35592.4, AD-35587.4, AD- |
| | | | | 35610.4, AD-35598.4, AD-35616.4 |
| GUAUUUGCCAUA | 2346 | UAUGGCAAAUAC | 2347 | AD-35604.4, AD-35575.4, AD- |
| | | | | 35581.4, AD-35587.4, AD-35610.4, AD- |
| | | | | 35598.4, AD-35616.4, AD-35593.4 |
| UAUUUGCCAUAA | 2348 | UUAUGGCAAAUA | 2349 | AD-35604.4, AD-35575.4, AD- |
| | | | | 35581.4, AD-35587.4, AD-35610.4, AD- |
| | | | | 35616.4, AD-35593.4, AD-35599.4 |
| AUUUGCCAUAAA | 2350 | UUUAUGGCAAAU | 2351 | AD-35575.4, AD-35581.4, AD- |
| | | | | 35587.4, AD-35610.4, AD-35605.4, AD- |
| | | | | 35616.4, AD-35593.4, AD-35599.4 |
| UUUGCCAUAAAU | 2352 | AUUUAUGGCAAA | 2353 | AD-35611.4, AD-35575.4, AD- |
| | | | | 35581.4, AD-35587.4, AD-35605.4, AD- |
| | | | | 35616.4, AD-35593.4, AD-35599.4 |
| UUGCCAUAAAUA | 2354 | UAUUUAUGGCAA | 2355 | AD-35611.4, AD-35575.4, AD- |
| | | | | 35581.4, AD-35587.4, AD-35605.4, AD- |
| | | | | 35593.4, AD-39827.1, AD-35599.4 |
| UGCCAUAAAUAA | 2356 | UUAUUUAUGGCA | 2357 | AD-35611.4, AD-35581.4, AD- |
| | | | | 35587.4, AD-39833.1, AD-35605.4, AD- |
| | | | | 35593.4, AD-39827.1, AD-35599.4 |
| GCCAUAAAUAAU | 2358 | AUUAUUUAUGGC | 2359 | AD-39839.1, AD-35611.4, AD- |
| | | | | 35587.4, AD-39833.1, AD-35605.4, AD- |
| | | | | 35593.4, AD-39827.1, AD-35599.4 |
| CCAUAAAUAAUA | 2360 | UAUUAUUUAUGG | 2361 | AD-39839.1, AD-35611.4, AD- |
| | | | | 39833.1, AD-35605.4, AD-35593.4, AD- |
| | | | | 39827.1, AD-35599.4, AD-39845.1 |
| CAUAAAUAAUAC | 2362 | GUAUUAUUUAUG | 2363 | AD-39839.1, AD-35611.4, AD- |
| | | | | 39833.1, AD-35605.4, AD-39851.1, AD- |
| | | | | 39827.1, AD-35599.4, AD-39845.1 |
| AUAAAUAAUACU | 2364 | AGUAUUAUUUAU | 2365 | AD-39839.1, AD-35611.4, AD- |
| | | | | 39857.1, AD-39833.1, AD-35605.4, AD- |
| | | | | 39851.1, AD-39827.1, AD-39845.1 |
| UAAAUAAUACUA | 2366 | UAGUAUUAUUUA | 2367 | AD-39839.1, AD-35611.4, AD- |
| | | | | 39857.1, AD-39833.1, AD-39851.1, AD- |
| | | | | 39863.1, AD-39827.1, AD-39845.1 |
| AAAUAAUACUAA | 2368 | UUAGUAUUAUUU | 2369 | AD-39839.1, AD-39857.1, AD- |
| | | | | 39869.1, AD-39833.1, AD-39851.1, AD- |
| | | | | 39863.1, AD-39827.1, AD-39845.1 |
| AAUAAUACUAAA | 2370 | UUUAGUAUUAUU | 2371 | AD-39828.1, AD-39839.1, AD- |
| | | | | 39857.1, AD-39869.1, AD-39833.1, AD- |
| | | | | 39851.1, AD-39863.1, AD-39845.1 |
| AUAAUACUAAAU | 2372 | AUUUAGUAUUAU | 2373 | AD-39828.1, AD-39839.1, AD- |
| | | | | 39857.1, AD-39834.1, AD-39869.1, AD- |
| | | | | 39851.1, AD-39863.1, AD-39845.1 |
| UAAUACUAAAUC | 2374 | GAUUUAGUAUUA | 2375 | AD-39828.1, AD-39857.1, AD- |
| | | | | 39834.1, AD-39869.1, AD-39840.1, AD- |
| | | | | 39851.1, AD-39863.1, AD-39845.1 |
| AAUACUAAAUCA | 2376 | UGAUUUAGUAUU | 2377 | AD-39828.1, AD-39857.1, AD- |
| | | | | 39834.1, AD-39869.1, AD-39840.1, AD- |
| | | | | 39851.1, AD-39863.1, AD-39846.1 |
| AUACUAAAUCAU | 2378 | AUGAUUUAGUAU | 2379 | AD-39828.1, AD-39852.1, AD- |
| | | | | 39857.1, AD-39834.1, AD-39869.1, AD- |
| | | | | 39840.1, AD-39863.1, AD-39846.1 |
| UACUAAAUCAUU | 2380 | AAUGAUUUAGUA | 2381 | AD-39828.1, AD-39852.1, AD- |
| | | | | 39834.1, AD-39858.1, AD-39869.1, AD- |
| | | | | 39840.1, AD-39863.1, AD-39846.1 |
| ACUAAAUCAUUU | 2382 | AAAUGAUUUAGU | 2383 | AD-39828.1, AD-39852.1, AD- |
| | | | | 39834.1, AD-39858.1, AD-39869.1, AD- |
| | | | | 39840.1, AD-39864.1, AD-39846.1 |
| CUAAAUCAUUUG | 2384 | CAAAUGAUUUAG | 2385 | AD-39828.1, AD-39852.1, AD- |
| | | | | 39870.1, AD-39834.1, AD-39858.1, AD- |
| | | | | 39840.1, AD-39864.1, AD-39846.1 |
| UAAAUCAUUUGA | 2386 | UCAAAUGAUUUA | 2387 | AD-39852.1, AD-39870.1, AD- |
| | | | | 39829.1, AD-39834.1, AD-39858.1, AD- |
| | | | | 39840.1, AD-39864.1, AD-39846.1 |
| AAAUCAUUUGAA | 2388 | UUCAAAUGAUUU | 2389 | AD-39852.1, AD-39870.1, AD- |
| | | | | 39829.1, AD-39858.1, AD-39840.1, AD- |
| | | | | 39835.1, AD-39864.1, AD-39846.1 |
| AAUCAUUUGAAG | 2390 | CUUCAAAUGAUU | 2391 | AD-39852.1, AD-39870.1, AD- |
| | | | | 39841.1, AD-39829.1, AD-39858.1, AD- |
| | | | | 39835.1, AD-39864.1, AD-39846.1 |
| AUCAUUUGAAGA | 2392 | UCUUCAAAUGAU | 2393 | AD-39852.1, AD-39870.1, AD- |
| | | | | 39841.1, AD-39829.1, AD-39858.1, AD- |
| | | | | 39835.1, AD-39864.1 |
| UCAUUUGAAGAU | 2394 | AUCUUCAAAUGA | 2395 | AD-39870.1, AD-39841.1, AD- |
| | | | | 39829.1, AD-39858.1, AD-39835.1, AD- |
| | | | | 39864.1, AD-39853.1 |
| CAUUUGAAGAUA | 2396 | UAUCUUCAAAUG | 2397 | AD-39870.1, AD-39841.1, AD- |
| | | | | 39829.1, AD-39835.1, AD-39859.1, AD- |
| | | | | 39864.1, AD-39853.1 |
| AUUUGAAGAUAU | 2398 | AUAUCUUCAAAU | 2399 | AD-39865.1, AD-39870.1, AD- |
| | | | | 39841.1, AD-39829.1, AD-39835.1, AD- |
| | | | | 39859.1, AD-39853.1 |
| UUUGAAGAUAUU | 2400 | AAUAUCUUCAAA | 2401 | AD-39871.1, AD-39865.1, AD- |
| | | | | 39841.1, AD-39829.1, AD-39835.1, AD- |
| | | | | 39859.1, AD-39853.1 |
| UUGAAGAUAUUC | 2402 | GAAUAUCUUCAA | 2403 | AD-39871.1, AD-39865.1, AD- |
| | | | | 39841.1, AD-39830.1, AD-39835.1, AD- |
| | | | | 39859.1, AD-39853.1 |
| UGAAGAUAUUCA | 2404 | UGAAUAUCUUCA | 2405 | AD-39871.1, AD-39865.1, AD- |
| | | | | 39841.1, AD-39830.1, AD-35617.4, AD- |
| | | | | 39859.1, AD-39853.1 |
| GAAGAUAUUCAC | 2406 | GUGAAUAUCUUC | 2407 | AD-39871.1, AD-39865.1, AD- |
| | | | | 39830.1, AD-35617.4, AD-35576.4, AD- |
| | | | | 39859.1, AD-39853.1 |
| AAGAUAUUCACC | 2408 | GGUGAAUAUCUU | 2409 | AD-35582.1, AD-39871.1, AD- |
| | | | | 39865.1, AD-39830.1, AD-35617.4, AD- |
| | | | | 35576.4, AD-39859.1, AD-39853.1 |
| AGAUAUUCACCA | 2410 | UGGUGAAUAUCU | 2411 | AD-35582.1, AD-39871.1, AD- |
| | | | | 39865.1, AD-39830.1, AD-35617.4, AD- |
| | | | | 35576.4, AD-39859.1, AD-35588.4 |
| GAUAUUCACCAU | 2412 | AUGGUGAAUAUC | 2413 | AD-35582.1, AD-39871.1, AD- |
| | | | | 39865.1, AD-35594.1, AD-39830.1, AD- |
| | | | | 35617.4, AD-35576.4, AD-35588.4 |
| AUAUUCACCAUU | 2414 | AAUGGUGAAUAU | 2415 | AD-35582.1, AD-39871.1, AD- |
| | | | | 35594.1, AD-35600.1, AD-39830.1, AD- |
| | | | | 35617.4, AD-35576.4, AD-35588.4 |
| UAUUCACCAUUA | 2416 | UAAUGGUGAAUA | 2417 | AD-35582.1, AD-35606.1, AD- |
| | | | | 35594.1, AD-35600.1, AD-39830.1, AD- |
| | | | | 35617.4, AD-35576.4, AD-35588.4 |
| AUUCACCAUUAU | 2418 | AUAAUGGUGAAU | 2419 | AD-35582.1, AD-35606.1, AD- |
| | | | | 35594.1, AD-35612.1, AD-35600.1, AD- |
| | | | | 35617.4, AD-35576.4, AD-35588.4 |
| UUCACCAUUAUA | 2420 | UAUAAUGGUGAA | 2421 | AD-35582.1, AD-35606.1, AD- |
| | | | | 35594.1, AD-35612.1, AD-35600.1, AD- |
| | | | | 35576.4, AD-35618.1, AD-35588.4 |
| UCACCAUUAUAG | 2422 | CUAUAAUGGUGA | 2423 | AD-35582.1, AD-35606.1, AD- |
| | | | | 35594.1, AD-35612.1, AD-35600.1, AD- |
| | | | | 35618.1, AD-35588.4, AD-38127.1 |
| CACCAUUAUAGA | 2424 | UCUAUAAUGGUG | 2425 | AD-38133.1, AD-35606.1, AD- |
| | | | | 35594.1, AD-35612.1, AD-35600.1, AD- |
| | | | | 35618.1, AD-35588.4, AD-38127.1 |
| ACCAUUAUAGAG | 2426 | CUCUAUAAUGGU | 2427 | AD-38133.1, AD-35606.1, AD- |
| | | | | 35594.1, AD-35612.1, AD-35600.1, AD- |
| | | | | 38139.1, AD-35618.1, AD-38127.1 |
| CCAUUAUAGAGA | 2428 | UCUCUAUAAUGG | 2429 | AD-38133.1, AD-35606.1, AD- |
| | | | | 35612.1, AD-35600.1, AD-38145.1, AD- |
| | | | | 38139.1, AD-35618.1, AD-38127.1 |
| CAUUAUAGAGAA | 2430 | UUCUCUAUAAUG | 2431 | AD-38133.1, AD-35606.1, AD- |
| | | | | 35612.1, AD-38145.1, AD-38139.1, AD- |
| | | | | 38151.1, AD-35618.1, AD-38127.1 |
| AUUAUAGAGAAC | 2432 | GUUCUCUAUAAU | 2433 | AD-38133.1, AD-35612.1, AD- |
| | | | | 38145.1, AD-38139.1, AD-38151.1, AD- |
| | | | | 38157.1, AD-35618.1, AD-38127.1 |
| UUAUAGAGAACA | 2434 | UGUUCUCUAUAA | 2435 | AD-38133.1, AD-38163.1, AD- |
| | | | | 38145.1, AD-38139.1, AD-38151.1, AD- |
| | | | | 38157.1, AD-35618.1, AD-38127.1 |
| UAUAGAGAACAA | 2436 | UUGUUCUCUAUA | 2437 | AD-38133.1, AD-38163.1, AD- |
| | | | | 38145.1, AD-38169.1, AD-38139.1, AD- |
| | | | | 38151.1, AD-38157.1, AD-38127.1 |
| AUAGAGAACAAA | 2438 | UUUGUUCUCUAU | 2439 | AD-38133.1, AD-38163.1, AD- |
| | | | | 38145.1, AD-38169.1, AD-38139.1, AD- |
| | | | | 38151.1, AD-38157.1, AD-38128.1 |
| UAGAGAACAAAU | 2440 | AUUUGUUCUCUA | 2441 | AD-38163.1, AD-38145.1, AD- |
| | | | | 38169.1, AD-38139.1, AD-38151.1, AD- |
| | | | | 38157.1, AD-38128.1, AD-38134.1 |
| AGAGAACAAAUU | 2442 | AAUUUGUUCUCU | 2443 | AD-38163.1, AD-38145.1, AD- |
| | | | | 38140.1, AD-38169.1, AD-38151.1, AD- |
| | | | | 38157.1, AD-38128.1, AD-38134.1 |
| GAGAACAAAUUA | 2444 | UAAUUUGUUCUC | 2445 | AD-38163.1, AD-38140.1, AD- |
| | | | | 38169.1, AD-38151.1, AD-38157.1, AD- |
| | | | | 38128.1, AD-39836.1, AD-38134.1 |
| AGAACAAAUUAA | 2446 | UUAAUUUGUUCU | 2447 | AD-38163.1, AD-38140.1, AD- |
| | | | | 38169.1, AD-38157.1, AD-38128.1, AD- |
| | | | | 39842.1, AD-39836.1, AD-38134.1 |
| GAACAAAUUAAA | 2448 | UUUAAUUUGUUC | 2449 | AD-38163.1, AD-38140.1, AD- |
| | | | | 38169.1, AD-38128.1, AD-39842.1, AD- |
| | | | | 39848.1, AD-39836.1, AD-38134.1 |
| AACAAAUUAAAA | 2450 | UUUUAAUUUGUU | 2451 | AD-38140.1, AD-38169.1, AD- |
| | | | | 39854.1, AD-38128.1, AD-39842.1, AD- |
| | | | | 39848.1, AD-39836.1, AD-38134.1 |
| ACAAAUUAAAAG | 2452 | CUUUUAAUUUGU | 2453 | AD-39860.1, AD-38140.1, AD- |
| | | | | 39854.1, AD-38128.1, AD-39842.1, AD- |
| | | | | 39848.1, AD-39836.1, AD-38134.1 |
| CAAAUUAAAAGA | 2454 | UCUUUUAAUUUG | 2455 | AD-39860.1, AD-38140.1, AD- |
| | | | | 39854.1, AD-39842.1, AD-39848.1, AD- |
| | | | | 39866.1, AD-39836.1, AD-38134.1 |
| AAAUUAAAAGAG | 2456 | CUCUUUUAAUUU | 2457 | AD-39992.1, AD-39860.1, AD- |
| | | | | 38140.1, AD-39854.1, AD-39842.1, AD- |
| | | | | 39848.1, AD-39866.1, AD-39836.1 |
| AAUUAAAAGAGU | 2458 | ACUCUUUUAAUU | 2459 | AD-39992.1, AD-39860.1, AD- |
| | | | | 39998.1, AD-39854.1, AD-39842.1, AD- |
| | | | | 39848.1, AD-39866.1, AD-39836.1 |
| AUUAAAAGAGUU | 2460 | AACUCUUUUAAU | 2461 | AD-39992.1, AD-39860.1, AD- |
| | | | | 40004.1, AD-39998.1, AD-39854.1, AD- |
| | | | | 39842.1, AD-39848.1, AD-39866.1 |
| UUAAAAGAGUUA | 2462 | UAACUCUUUUAA | 2463 | AD-39992.1, AD-39860.1, AD- |
| | | | | 40004.1, AD-39998.1, AD-39854.1, AD- |
| | | | | 40010.1, AD-39848.1, AD-39866.1 |
| UAAAAGAGUUAA | 2464 | UUAACUCUUUUA | 2465 | AD-40016.1, AD-39992.1, AD- |
| | | | | 39860.1, AD-40004.1, AD-39998.1, AD- |
| | | | | 39854.1, AD-40010.1, AD-39866.1 |
| AAAAGAGUUAAG | 2466 | CUUAACUCUUUU | 2467 | AD-40016.1, AD-39992.1, AD- |
| | | | | 39860.1, AD-40022.1, AD-40004.1, AD- |
| | | | | 39998.1, AD-40010.1, AD-39866.1 |
| AAAGAGUUAAGG | 2468 | CCUUAACUCUUU | 2469 | AD-40016.1, AD-40028.1, AD- |
| | | | | 39992.1, AD-40022.1, AD-40004.1, AD- |
| | | | | 39998.1, AD-40010.1, AD-39866.1 |
| AAGAGUUAAGGA | 2470 | UCCUUAACUCUU | 2471 | AD-40016.1, AD-40028.1, AD- |
| | | | | 40034.1, AD-39992.1, AD-40022.1, AD- |
| | | | | 40004.1, AD-39998.1, AD-40010.1 |
| AGAGUUAAGGAC | 2472 | GUCCUUAACUCU | 2473 | AD-40016.1, AD-40028.1, AD- |
| | | | | 40034.1, AD-40022.1, AD-40004.1, AD- |
| | | | | 39998.1, AD-40010.1 |
| GAGUUAAGGACU | 2474 | AGUCCUUAACUC | 2475 | AD-40016.1, AD-40028.1, AD- |
| | | | | 40034.1, AD-39999.1, AD-40022.1, AD- |
| | | | | 40004.1, AD-40010.1 |
| AGUUAAGGACUC | 2476 | GAGUCCUUAACU | 2477 | AD-40016.1, AD-40028.1, AD- |
| | | | | 40034.1, AD-39999.1, AD-40022.1, AD- |
| | | | | 40005.1, AD-40010.1 |
| GUUAAGGACUCU | 2478 | AGAGUCCUUAAC | 2479 | AD-40016.1, AD-40011.1, AD- |
| | | | | 40028.1, AD-40034.1, AD-39999.1, AD- |
| | | | | 40022.1, AD-40005.1 |
| UUAAGGACUCUG | 2480 | CAGAGUCCUUAA | 2481 | AD-40017.1, AD-40011.1, AD- |
| | | | | 40028.1, AD-40034.1, AD-39999.1, AD- |
| | | | | 40022.1, AD-40005.1 |
| UAAGGACUCUGA | 2482 | UCAGAGUCCUUA | 2483 | AD-40017.1, AD-40011.1, AD- |
| | | | | 40028.1, AD-40034.1, AD-39999.1, AD- |
| | | | | 40005.1 |
| AAGGACUCUGAA | 2484 | UUCAGAGUCCUU | 2485 | AD-40017.1, AD-40029.1, AD- |
| | | | | 40011.1, AD-40034.1, AD-39999.1, AD- |
| | | | | 40005.1 |
| AGGACUCUGAAG | 2486 | CUUCAGAGUCCU | 2487 | AD-40017.1, AD-40029.1, AD- |
| | | | | 40011.1, AD-39999.1, AD-40005.1, AD- |
| | | | | 40035.1 |
| GGACUCUGAAGA | 2488 | UCUUCAGAGUCC | 2489 | AD-40017.1, AD-40029.1, AD- |
| | | | | 40011.1, AD-39994.1, AD-39999.1, AD- |
| | | | | 40005.1, AD-40035.1 |
| GACUCUGAAGAU | 2490 | AUCUUCAGAGUC | 2491 | AD-40017.1, AD-40029.1, AD- |
| | | | | 40011.1, AD-40000.1, AD-39994.1, AD- |
| | | | | 40005.1, AD-40035.1 |
| ACUCUGAAGAUG | 2492 | CAUCUUCAGAGU | 2493 | AD-40017.1, AD-40029.1, AD- |
| | | | | 40011.1, AD-40000.1, AD-39994.1, AD- |
| | | | | 40006.1, AD-40035.1 |
| CUCUGAAGAUGU | 2494 | ACAUCUUCAGAG | 2495 | AD-40017.1, AD-40029.1, AD- |
| | | | | 40000.1, AD-39994.1, AD-40012.1, AD- |
| | | | | 40006.1, AD-40035.1 |
| UCUGAAGAUGUA | 2496 | UACAUCUUCAGA | 2497 | AD-40029.1, AD-40000.1, AD- |
| | | | | 39994.1, AD-40012.1, AD-40006.1, AD- |
| | | | | 40035.1, AD-40018.1 |
| CUGAAGAUGUAC | 2498 | GUACAUCUUCAG | 2499 | AD-40029.1, AD-40000.1, AD- |
| | | | | 39994.1, AD-40024.1, AD-40012.1, AD- |
| | | | | 40006.1, AD-40035.1, AD-40018.1 |
| UGAAGAUGUACC | 2500 | GGUACAUCUUCA | 2501 | AD-40030.1, AD-40000.1, AD- |
| | | | | 39994.1, AD-40024.1, AD-40012.1, AD- |
| | | | | 40006.1, AD-40035.1, AD-40018.1 |
| GAAGAUGUACCU | 2502 | AGGUACAUCUUC | 2503 | AD-40030.1, AD-40000.1, AD- |
| | | | | 39994.1, AD-40024.1, AD-40012.1, AD- |
| | | | | 40006.1, AD-38146.1, AD-40018.1 |
| AAGAUGUACCUA | 2504 | UAGGUACAUCUU | 2505 | AD-40030.1, AD-40000.1, AD- |
| | | | | 40024.1, AD-40012.1, AD-40006.1, AD- |
| | | | | 38146.1, AD-40018.1, AD-38152.1 |
| AGAUGUACCUAU | 2506 | AUAGGUACAUCU | 2507 | AD-40030.1, AD-40024.1, AD- |
| | | | | 40012.1, AD-40006.1, AD-38158.1, AD- |
| | | | | 38146.1, AD-40018.1, AD-38152.1 |
| GAUGUACCUAUG | 2508 | CAUAGGUACAUC | 2509 | AD-40030.1, AD-40024.1, AD- |
| | | | | 40012.1, AD-38164.1, AD-38158.1, AD- |
| | | | | 38146.1, AD-40018.1, AD-38152.1 |
| AUGUACCUAUGG | 2510 | CCAUAGGUACAU | 2511 | AD-40030.1, AD-40024.1, AD- |
| | | | | 38164.1, AD-38170.1, AD-38158.1, AD- |
| | | | | 38146.1, AD-40018.1, AD-38152.1 |
| UGUACCUAUGGU | 2512 | ACCAUAGGUACA | 2513 | AD-40030.1, AD-40024.1, AD- |
| | | | | 38164.1, AD-38129.1, AD-38170.1, AD- |
| | | | | 38158.1, AD-38146.1, AD-38152.1 |
| GUACCUAUGGUC | 2514 | GACCAUAGGUAC | 2515 | AD-40030.1, AD-38164.1, AD- |
| | | | | 38129.1, AD-38170.1, AD-38158.1, AD- |
| | | | | 38146.1, AD-38152.1, AD-38135.1 |
| UACCUAUGGUCC | 2516 | GGACCAUAGGUA | 2517 | AD-38164.1, AD-38129.1, AD- |
| | | | | 38170.1, AD-38158.1, AD-38146.1, AD- |
| | | | | 38141.1, AD-38152.1, AD-38135.1 |
| ACCUAUGGUCCU | 2518 | AGGACCAUAGGU | 2519 | AD-38164.1, AD-38129.1, AD- |
| | | | | 38170.1, AD-38147.1, AD-38158.1, AD- |
| | | | | 38141.1, AD-38152.1, AD-38135.1 |
| CCUAUGGUCCUA | 2520 | UAGGACCAUAGG | 2521 | AD-38164.1, AD-38129.1, AD- |
| | | | | 38153.1, AD-38170.1, AD-38147.1, AD- |
| | | | | 38158.1, AD-38141.1, AD-38135.1 |
| CUAUGGUCCUAG | 2522 | CUAGGACCAUAG | 2523 | AD-38164.1, AD-38159.1, AD- |
| | | | | 38129.1, AD-38153.1, AD-38170.1, AD- |
| | | | | 38147.1, AD-38141.1, AD-38135.1 |
| UAUGGUCCUAGU | 2524 | ACUAGGACCAUA | 2525 | AD-38165.1, AD-38159.1, AD- |
| | | | | 38129.1, AD-38153.1, AD-38170.1, AD- |
| | | | | 38147.1, AD-38141.1, AD-38135.1 |
| AUGGUCCUAGUA | 2526 | UACUAGGACCAU | 2527 | AD-38165.1, AD-38171.1, AD- |
| | | | | 38159.1, AD-38129.1, AD-38153.1, AD- |
| | | | | 38147.1, AD-38141.1, AD-38135.1 |
| UGGUCCUAGUAG | 2528 | CUACUAGGACCA | 2529 | AD-38165.1, AD-38171.1, AD- |
| | | | | 38159.1, AD-38153.1, AD-38147.1, AD- |
| | | | | 38141.1, AD-38130.1, AD-38135.1 |
| GGUCCUAGUAGG | 2530 | CCUACUAGGACC | 2531 | AD-38165.1, AD-38171.1, AD- |
| | | | | 38159.1, AD-38136.1, AD-38153.1, AD- |
| | | | | 38147.1, AD-38141.1, AD-38130.1 |
| GUCCUAGUAGGA | 2532 | UCCUACUAGGAC | 2533 | AD-38165.1, AD-38171.1, AD- |
| | | | | 38159.1, AD-38136.1, AD-38153.1, AD- |
| | | | | 38147.1, AD-38142.1, AD-38130.1 |
| UCCUAGUAGGAA | 2534 | UUCCUACUAGGA | 2535 | AD-38165.1, AD-38171.1, AD- |
| | | | | 38159.1, AD-38136.1, AD-38148.1, AD- |
| | | | | 38153.1, AD-38142.1, AD-38130.1 |
| CCUAGUAGGAAA | 2536 | UUUCCUACUAGG | 2537 | AD-38165.1, AD-38171.1, AD- |
| | | | | 38154.1, AD-38159.1, AD-38136.1, AD- |
| | | | | 38148.1, AD-38142.1, AD-38130.1 |
| CUAGUAGGAAAU | 2538 | AUUUCCUACUAG | 2539 | AD-38165.1, AD-38171.1, AD- |
| | | | | 38154.1, AD-38136.1, AD-38148.1, AD- |
| | | | | 38160.1, AD-38142.1, AD-38130.1 |
| UAGUAGGAAAUA | 2540 | UAUUUCCUACUA | 2541 | AD-38171.1, AD-38154.1, AD- |
| | | | | 38136.1, AD-38148.1, AD-38166.1, AD- |
| | | | | 38160.1, AD-38142.1, AD-38130.1 |
| AGUAGGAAAUAA | 2542 | UUAUUUCCUACU | 2543 | AD-38154.1, AD-38136.1, AD- |
| | | | | 38148.1, AD-38172.1, AD-38166.1, AD- |
| | | | | 38160.1, AD-38142.1, AD-38130.1 |
| GUAGGAAAUAAA | 2544 | UUUAUUUCCUAC | 2545 | AD-40036.1, AD-38154.1, AD- |
| | | | | 38136.1, AD-38148.1, AD-38172.1, AD- |
| | | | | 38166.1, AD-38160.1, AD-38142.1 |
| UAGGAAAUAAAU | 2546 | AUUUAUUUCCUA | 2547 | AD-39995.1, AD-40036.1, AD- |
| | | | | 38154.1, AD-38148.1, AD-38172.1, AD- |
| | | | | 38166.1, AD-38160.1, AD-38142.1 |
| AGGAAAUAAAUG | 2548 | CAUUUAUUUCCU | 2549 | AD-39995.1, AD-40036.1, AD- |
| | | | | 38154.1, AD-40001.1, AD-38148.1, AD- |
| | | | | 38172.1, AD-38166.1, AD-38160.1 |
| GGAAAUAAAUGU | 2550 | ACAUUUAUUUCC | 2551 | AD-39995.1, AD-40036.1, AD- |
| | | | | 38154.1, AD-40001.1, AD-38172.1, AD- |
| | | | | 38166.1, AD-38160.1, AD-40007.1 |
| GAAAUAAAUGUG | 2552 | CACAUUUAUUUC | 2553 | AD-39995.1, AD-40036.1, AD- |
| | | | | 40013.1, AD-40001.1, AD-38172.1, AD- |
| | | | | 38166.1, AD-38160.1, AD-40007.1 |
| AAAUAAAUGUGA | 2554 | UCACAUUUAUUU | 2555 | AD-39995.1, AD-40036.1, AD- |
| | | | | 40013.1, AD-40001.1, AD-38172.1, AD- |
| | | | | 38166.1, AD-40007.1, AD-40019.1 |
| AAUAAAUGUGAU | 2556 | AUCACAUUUAUU | 2557 | AD-39995.1, AD-40036.1, AD- |
| | | | | 40013.1, AD-40001.1, AD-40025.1, AD- |
| | | | | 38172.1, AD-40007.1, AD-40019.1 |
| AUAAAUGUGAUU | 2558 | AAUCACAUUUAU | 2559 | AD-39995.1, AD-40036.1, AD- |
| | | | | 40013.1, AD-40001.1, AD-40025.1, AD- |
| | | | | 40031.1, AD-40007.1, AD-40019.1 |
| UAAAUGUGAUUU | 2560 | AAAUCACAUUUA | 2561 | AD-39995.1, AD-40013.1, AD- |
| | | | | 40037.1, AD-40001.1, AD-40025.1, AD- |
| | | | | 40031.1, AD-40007.1, AD-40019.1 |
| AAAUGUGAUUUG | 2562 | CAAAUCACAUUU | 2563 | AD-40013.1, AD-40037.1, AD- |
| | | | | 40001.1, AD-40025.1, AD-40031.1, AD- |
| | | | | 40007.1, AD-39996.1, AD-40019.1 |
| AAUGUGAUUUGC | 2564 | GCAAAUCACAUU | 2565 | AD-40013.1, AD-40037.1, AD- |
| | | | | 40025.1, AD-40031.1, AD-40002.1, AD- |
| | | | | 40007.1, AD-39996.1, AD-40019.1 |
| AUGUGAUUUGCC | 2566 | GGCAAAUCACAU | 2567 | AD-40008.1, AD-40013.1, AD- |
| | | | | 40037.1, AD-40025.1, AD-40031.1, AD- |
| | | | | 40002.1, AD-39996.1, AD-40019.1 |
| UGUGAUUUGCCU | 2568 | AGGCAAAUCACA | 2569 | AD-40008.1, AD-40037.1, AD- |
| | | | | 40025.1, AD-40031.1, AD-40002.1, AD- |
| | | | | 40014.1, AD-39996.1, AD-40019.1 |
| GUGAUUUGCCUU | 2570 | AAGGCAAAUCAC | 2571 | AD-40008.1, AD-40037.1, AD- |
| | | | | 40020.1, AD-40025.1, AD-40031.1, AD- |
| | | | | 40002.1, AD-40014.1, AD-39996.1 |
| UGAUUUGCCUUC | 2572 | GAAGGCAAAUCA | 2573 | AD-40026.1, AD-40008.1, AD- |
| | | | | 40037.1, AD-40020.1, AD-40031.1, AD- |
| | | | | 40002.1, AD-40014.1, AD-39996.1 |
| GAUUUGCCUUCU | 2574 | AGAAGGCAAAUC | 2575 | AD-40026.1, AD-40008.1, AD- |
| | | | | 40032.1, AD-40037.1, AD-40020.1, AD- |
| | | | | 40002.1, AD-40014.1, AD-39996.1 |
| AUUUGCCUUCUA | 2576 | UAGAAGGCAAAU | 2577 | AD-40038.1, AD-40026.1, AD- |
| | | | | 40008.1, AD-40032.1, AD-40020.1, AD- |
| | | | | 40002.1, AD-40014.1, AD-39996.1 |
| UUUGCCUUCUAG | 2578 | CUAGAAGGCAAA | 2579 | AD-40038.1, AD-40026.1, AD- |
| | | | | 40008.1, AD-40032.1, AD-40020.1, AD- |
| | | | | 40002.1, AD-39997.1, AD-40014.1 |
| UUGCCUUCUAGA | 2580 | UCUAGAAGGCAA | 2581 | AD-40038.1, AD-40026.1, AD- |
| | | | | 40008.1, AD-40032.1, AD-40020.1, AD- |
| | | | | 39997.1, AD-40014.1 |
| UGCCUUCUAGAA | 2582 | UUCUAGAAGGCA | 2583 | AD-40038.1, AD-40026.1, AD- |
| | | | | 40032.1, AD-40020.1, AD-40009.1, AD- |
| | | | | 39997.1, AD-40014.1 |
| GCCUUCUAGAAC | 2584 | GUUCUAGAAGGC | 2585 | AD-40038.1, AD-40026.1, AD- |
| | | | | 40015.1, AD-40032.1, AD-40020.1, AD- |
| | | | | 40009.1, AD-39997.1 |
| CCUUCUAGAACA | 2586 | UGUUCUAGAAGG | 2587 | AD-40038.1, AD-40026.1, AD- |
| | | | | 40015.1, AD-40021.1, AD-40032.1, AD- |
| | | | | 40009.1, AD-39997.1 |
| CUUCUAGAACAG | 2588 | CUGUUCUAGAAG | 2589 | AD-40038.1, AD-40027.1, AD- |
| | | | | 40015.1, AD-40021.1, AD-40032.1, AD- |
| | | | | 40009.1, AD-39997.1 |
| UUCUAGAACAGU | 2590 | ACUGUUCUAGAA | 2591 | AD-40038.1, AD-40027.1, AD- |
| | | | | 40015.1, AD-40021.1, AD-40009.1, AD- |
| | | | | 40033.1, AD-39997.1 |
| UCUAGAACAGUA | 2592 | UACUGUUCUAGA | 2593 | AD-40027.1, AD-40015.1, AD- |
| | | | | 40021.1, AD-40039.1, AD-40009.1, AD- |
| | | | | 40033.1, AD-39997.1 |
| CUAGAACAGUAG | 2594 | CUACUGUUCUAG | 2595 | AD-40027.1, AD-40015.1, AD- |
| | | | | 40021.1, AD-40039.1, AD-40009.1, AD- |
| | | | | 40033.1, AD-40045.1 |
| UAGAACAGUAGA | 2596 | UCUACUGUUCUA | 2597 | AD-40027.1, AD-40015.1, AD- |
| | | | | 40021.1, AD-40051.1, AD-40039.1, AD- |
| | | | | 40009.1, AD-40033.1, AD-40045.1 |
| AGAACAGUAGAC | 2598 | GUCUACUGUUCU | 2599 | AD-40027.1, AD-40057.1, AD- |
| | | | | 40015.1, AD-40021.1, AD-40051.1, AD- |
| | | | | 40039.1, AD-40033.1, AD-40045.1 |
| GAACAGUAGACA | 2600 | UGUCUACUGUUC | 2601 | AD-40027.1, AD-40057.1, AD- |
| | | | | 40021.1, AD-40051.1, AD-40039.1, AD- |
| | | | | 40063.1, AD-40033.1, AD-40045.1 |
| AACAGUAGACAC | 2602 | GUGUCUACUGUU | 2603 | AD-40027.1, AD-40057.1, AD- |
| | | | | 40051.1, AD-40039.1, AD-40063.1, AD- |
| | | | | 40033.1, AD-40045.1, AD-40069.1 |
| ACAGUAGACACA | 2604 | UGUGUCUACUGU | 2605 | AD-40057.1, AD-40051.1, AD- |
| | | | | 40075.1, AD-40039.1, AD-40063.1, AD- |
| | | | | 40033.1, AD-40045.1, AD-40069.1 |
| CAGUAGACACAA | 2606 | UUGUGUCUACUG | 2607 | AD-40057.1, AD-40051.1, AD- |
| | | | | 40075.1, AD-40039.1, AD-40081.1, AD- |
| | | | | 40063.1, AD-40045.1, AD-40069.1 |
| AGUAGACACAAA | 2608 | UUUGUGUCUACU | 2609 | AD-40057.1, AD-40051.1, AD- |
| | | | | 40075.1, AD-40040.1, AD-40081.1, AD- |
| | | | | 40063.1, AD-40045.1, AD-40069.1 |
| GUAGACACAAAA | 2610 | UUUUGUGUCUAC | 2611 | AD-40057.1, AD-40051.1, AD- |
| | | | | 40075.1, AD-40046.1, AD-40040.1, AD- |
| | | | | 40081.1, AD-40063.1, AD-40069.1 |
| UAGACACAAAAC | 2612 | GUUUUGUGUCUA | 2613 | AD-40057.1, AD-40075.1, AD- |
| | | | | 40052.1, AD-40046.1, AD-40040.1, AD- |
| | | | | 40081.1, AD-40063.1, AD-40069.1 |
| AGACACAAAACA | 2614 | UGUUUUGUGUCU | 2615 | AD-40058.1, AD-40075.1, AD- |
| | | | | 40052.1, AD-40046.1, AD-40040.1, AD- |
| | | | | 40081.1, AD-40063.1, AD-40069.1 |
| GACACAAAACAG | 2616 | CUGUUUUGUGUC | 2617 | AD-40058.1, AD-40075.1, AD- |
| | | | | 40052.1, AD-40046.1, AD-40040.1, AD- |
| | | | | 40081.1, AD-40064.1, AD-40069.1 |
| ACACAAAACAGG | 2618 | CCUGUUUUGUGU | 2619 | AD-40070.1, AD-40058.1, AD- |
| | | | | 40075.1, AD-40052.1, AD-40046.1, AD- |
| | | | | 40040.1, AD-40081.1, AD-40064.1 |
| CACAAAACAGGC | 2620 | GCCUGUUUUGUG | 2621 | AD-40070.1, AD-40058.1, AD- |
| | | | | 40052.1, AD-40046.1, AD-40076.1, AD- |
| | | | | 40040.1, AD-40081.1, AD-40064.1 |
| ACAAAACAGGCU | 2622 | AGCCUGUUUUGU | 2623 | AD-40070.1, AD-40058.1, AD- |
| | | | | 40052.1, AD-40046.1, AD-40076.1, AD- |
| | | | | 40040.1, AD-40082.1, AD-40064.1 |
| CAAAACAGGCUC | 2624 | GAGCCUGUUUUG | 2625 | AD-40070.1, AD-40058.1, AD- |
| | | | | 40052.1, AD-40046.1, AD-40076.1, AD- |
| | | | | 40041.1, AD-40082.1, AD-40064.1 |
| AAAACAGGCUCA | 2626 | UGAGCCUGUUUU | 2627 | AD-40070.1, AD-40058.1, AD- |
| | | | | 40052.1, AD-40076.1, AD-40041.1, AD- |
| | | | | 40082.1, AD-40064.1, AD-40047.1 |
| AAACAGGCUCAG | 2628 | CUGAGCCUGUUU | 2629 | AD-40070.1, AD-40058.1, AD- |
| | | | | 40076.1, AD-40041.1, AD-40082.1, AD- |
| | | | | 40053.1, AD-40064.1, AD-40047.1 |
| AACAGGCUCAGG | 2630 | CCUGAGCCUGUU | 2631 | AD-40059.1, AD-40070.1, AD- |
| | | | | 40076.1, AD-40041.1, AD-40082.1, AD- |
| | | | | 40053.1, AD-40064.1, AD-40047.1 |
| ACAGGCUCAGGA | 2632 | UCCUGAGCCUGU | 2633 | AD-40059.1, AD-40070.1, AD- |
| | | | | 40065.1, AD-40076.1, AD-40041.1, AD- |
| | | | | 40082.1, AD-40053.1, AD-40047.1 |
| CAGGCUCAGGAC | 2634 | GUCCUGAGCCUG | 2635 | AD-40059.1, AD-40065.1, AD- |
| | | | | 40076.1, AD-40041.1, AD-40082.1, AD- |
| | | | | 40071.1, AD-40053.1, AD-40047.1 |
| AGGCUCAGGACU | 2636 | AGUCCUGAGCCU | 2637 | AD-40059.1, AD-40065.1, AD- |
| | | | | 40041.1, AD-40082.1, AD-40077.1, AD- |
| | | | | 40071.1, AD-40053.1, AD-40047.1 |
| GGCUCAGGACUU | 2638 | AAGUCCUGAGCC | 2639 | AD-40059.1, AD-40065.1, AD- |
| | | | | 40041.1, AD-40077.1, AD-40071.1, AD- |
| | | | | 40053.1, AD-40083.1, AD-40047.1 |
| GCUCAGGACUUA | 2640 | UAAGUCCUGAGC | 2641 | AD-40059.1, AD-40065.1, AD- |
| | | | | 40042.1, AD-40077.1, AD-40071.1, AD- |
| | | | | 40053.1, AD-40083.1, AD-40047.1 |
| CUCAGGACUUAG | 2642 | CUAAGUCCUGAG | 2643 | AD-40059.1, AD-40065.1, AD- |
| | | | | 40042.1, AD-40048.1, AD-40077.1, AD- |
| | | | | 40071.1, AD-40053.1, AD-40083.1 |
| UCAGGACUUAGC | 2644 | GCUAAGUCCUGA | 2645 | AD-40059.1, AD-40065.1, AD- |
| | | | | 40054.1, AD-40042.1, AD-40048.1, AD- |
| | | | | 40077.1, AD-40071.1, AD-40083.1 |
| CAGGACUUAGCA | 2646 | UGCUAAGUCCUG | 2647 | AD-40065.1, AD-40054.1, AD- |
| | | | | 40060.1, AD-40042.1, AD-40048.1, AD- |
| | | | | 40077.1, AD-40071.1, AD-40083.1 |
| AGGACUUAGCAA | 2648 | UUGCUAAGUCCU | 2649 | AD-40054.1, AD-40060.1, AD- |
| | | | | 40042.1, AD-40066.1, AD-40048.1, AD- |
| | | | | 40077.1, AD-40071.1, AD-40083.1 |
| GGACUUAGCAAG | 2650 | CUUGCUAAGUCC | 2651 | AD-40072.1, AD-40054.1, AD- |
| | | | | 40060.1, AD-40042.1, AD-40066.1, AD- |
| | | | | 40048.1, AD-40077.1, AD-40083.1 |
| GACUUAGCAAGA | 2652 | UCUUGCUAAGUC | 2653 | AD-40072.1, AD-40054.1, AD- |
| | | | | 40060.1, AD-40042.1, AD-40066.1, AD- |
| | | | | 40048.1, AD-40078.1, AD-40083.1 |
| ACUUAGCAAGAA | 2654 | UUCUUGCUAAGU | 2655 | AD-40072.1, AD-40054.1, AD- |
| | | | | 40060.1, AD-40042.1, AD-40066.1, AD- |
| | | | | 40048.1, AD-40084.1, AD-40078.1 |
| CUUAGCAAGAAG | 2656 | CUUCUUGCUAAG | 2657 | AD-40072.1, AD-40054.1, AD- |
| | | | | 40060.1, AD-40066.1, AD-40043.1, AD- |
| | | | | 40048.1, AD-40084.1, AD-40078.1 |
| UUAGCAAGAAGU | 2658 | ACUUCUUGCUAA | 2659 | AD-40072.1, AD-40054.1, AD- |
| | | | | 40060.1, AD-40066.1, AD-40043.1, AD- |
| | | | | 40084.1, AD-40049.1, AD-40078.1 |
| UAGCAAGAAGUU | 2660 | AACUUCUUGCUA | 2661 | AD-40072.1, AD-40060.1, AD- |
| | | | | 40066.1, AD-40055.1, AD-40043.1, AD- |
| | | | | 40084.1, AD-40049.1, AD-40078.1 |
| AGCAAGAAGUUA | 2662 | UAACUUCUUGCU | 2663 | AD-40072.1, AD-40066.1, AD- |
| | | | | 40055.1, AD-40043.1, AD-40061.1, AD- |
| | | | | 40084.1, AD-40049.1, AD-40078.1 |
| GCAAGAAGUUAU | 2664 | AUAACUUCUUGC | 2665 | AD-40072.1, AD-40055.1, AD- |
| | | | | 40067.1, AD-40043.1, AD-40061.1, AD- |
| | | | | 40084.1, AD-40049.1, AD-40078.1 |
| CAAGAAGUUAUG | 2666 | CAUAACUUCUUG | 2667 | AD-40055.1, AD-40067.1, AD- |
| | | | | 40043.1, AD-40061.1, AD-40084.1, AD- |
| | | | | 40073.1, AD-40049.1, AD-40078.1 |
| AAGAAGUUAUGG | 2668 | CCAUAACUUCUU | 2669 | AD-40055.1, AD-40067.1, AD- |
| | | | | 40043.1, AD-40061.1, AD-40084.1, AD- |
| | | | | 40073.1, AD-40079.1, AD-40049.1 |
| AGAAGUUAUGGA | 2670 | UCCAUAACUUCU | 2671 | AD-40085.1, AD-40055.1, AD- |
| | | | | 40067.1, AD-40043.1, AD-40061.1, AD- |
| | | | | 40073.1, AD-40079.1, AD-40049.1 |
| GAAGUUAUGGAA | 2672 | UUCCAUAACUUC | 2673 | AD-40085.1, AD-40044.1, AD- |
| | | | | 40055.1, AD-40067.1, AD-40061.1, AD- |
| | | | | 40073.1, AD-40079.1, AD-40049.1 |
| AAGUUAUGGAAU | 2674 | AUUCCAUAACUU | 2675 | AD-40085.1, AD-40044.1, AD- |
| | | | | 40055.1, AD-40067.1, AD-40061.1, AD- |
| | | | | 40050.1, AD-40073.1, AD-40079.1 |
| AGUUAUGGAAUU | 2676 | AAUUCCAUAACU | 2677 | AD-40085.1, AD-40044.1, AD- |
| | | | | 40067.1, AD-40056.1, AD-40061.1, AD- |
| | | | | 40050.1, AD-40073.1, AD-40079.1 |
| GUUAUGGAAUUC | 2678 | GAAUUCCAUAAC | 2679 | AD-40062.1, AD-40085.1, AD- |
| | | | | 40044.1, AD-40067.1, AD-40056.1, AD- |
| | | | | 40050.1, AD-40073.1, AD-40079.1 |
| UUAUGGAAUUCC | 2680 | GGAAUUCCAUAA | 2681 | AD-40068.1, AD-40062.1, AD- |
| | | | | 40085.1, AD-40044.1, AD-40056.1, AD- |
| | | | | 40050.1, AD-40073.1, AD-40079.1 |
| UAUGGAAUUCCU | 2682 | AGGAAUUCCAUA | 2683 | AD-40074.1, AD-40068.1, AD- |
| | | | | 40062.1, AD-40085.1, AD-40044.1, AD- |
| | | | | 40056.1, AD-40050.1, AD-40079.1 |
| AUGGAAUUCCUU | 2684 | AAGGAAUUCCAU | 2685 | AD-40080.1, AD-40074.1, AD- |
| | | | | 40068.1, AD-40062.1, AD-40085.1, AD- |
| | | | | 40044.1, AD-40056.1, AD-40050.1 |
| UGGAAUUCCUUU | 2686 | AAAGGAAUUCCA | 2687 | AD-40080.1, AD-40074.1, AD- |
| | | | | 40068.1, AD-40062.1, AD-40044.1, AD- |
| | | | | 40056.1, AD-40050.1 |
| GGAAUUCCUUUU | 2688 | AAAAGGAAUUCC | 2689 | AD-40080.1, AD-40074.1, AD- |
| | | | | 40068.1, AD-40062.1, AD-40056.1, AD- |
| | | | | 40050.1, AD-38131.1 |
| GAAUUCCUUUUA | 2690 | UAAAAGGAAUUC | 2691 | AD-40080.1, AD-40074.1, AD- |
| | | | | 40068.1, AD-40062.1, AD-38137.1, AD- |
| | | | | 40056.1, AD-38131.1 |
| AAUUCCUUUUAU | 2692 | AUAAAAGGAAUU | 2693 | AD-40080.1, AD-38143.1, AD- |
| | | | | 40074.1, AD-40068.1, AD-40062.1, AD- |
| | | | | 38137.1, AD-38131.1 |
| AUUCCUUUUAUU | 2694 | AAUAAAAGGAAU | 2695 | AD-40080.1, AD-38149.1, AD- |
| | | | | 38143.1, AD-40074.1, AD-40068.1, AD- |
| | | | | 38137.1, AD-38131.1 |
| UUCCUUUUAUUG | 2696 | CAAUAAAAGGAA | 2697 | AD-40080.1, AD-38149.1, AD- |
| | | | | 38143.1, AD-40074.1, AD-38137.1, AD- |
| | | | | 38155.1, AD-38131.1 |
| UCCUUUUAUUGA | 2698 | UCAAUAAAAGGA | 2699 | AD-40080.1, AD-38149.1, AD- |
| | | | | 38143.1, AD-38137.1, AD-38161.1, AD- |
| | | | | 38155.1, AD-38131.1 |
| CCUUUUAUUGAA | 2700 | UUCAAUAAAAGG | 2701 | AD-38149.1, AD-38143.1, AD- |
| | | | | 38137.1, AD-38161.1, AD-38167.1, AD- |
| | | | | 38155.1, AD-38131.1 |
| CUUUUAUUGAAA | 2702 | UUUCAAUAAAAG | 2703 | AD-38149.1, AD-38143.1, AD- |
| | | | | 38137.1, AD-38161.1, AD-38173.1, AD- |
| | | | | 38167.1, AD-38155.1, AD-38131.1 |
| UUUUAUUGAAAC | 2704 | GUUUCAAUAAAA | 2705 | AD-38149.1, AD-38143.1, AD- |
| | | | | 38132.1, AD-38137.1, AD-38161.1, AD- |
| | | | | 38173.1, AD-38167.1, AD-38155.1 |
| UUUAUUGAAACA | 2706 | UGUUUCAAUAAA | 2707 | AD-38149.1, AD-38143.1, AD- |
| | | | | 38132.1, AD-38161.1, AD-38173.1, AD- |
| | | | | 38138.1, AD-38167.1, AD-38155.1 |
| UUAUUGAAACAU | 2708 | AUGUUUCAAUAA | 2709 | AD-38149.1, AD-38132.1, AD- |
| | | | | 38161.1, AD-38173.1, AD-38138.1, AD- |
| | | | | 38167.1, AD-38155.1, AD-38144.1 |
| UAUUGAAACAUC | 2710 | GAUGUUUCAAUA | 2711 | AD-38132.1, AD-38161.1, AD- |
| | | | | 38173.1, AD-38138.1, AD-38167.1, AD- |
| | | | | 38155.1, AD-38150.1, AD-38144.1 |
| AUUGAAACAUCA | 2712 | UGAUGUUUCAAU | 2713 | AD-38132.1, AD-38156.1, AD- |
| | | | | 38161.1, AD-38173.1, AD-38138.1, AD- |
| | | | | 38167.1, AD-38150.1, AD-38144.1 |
| UUGAAACAUCAG | 2714 | CUGAUGUUUCAA | 2715 | AD-38132.1, AD-38162.1, AD- |
| | | | | 38156.1, AD-38173.1, AD-38138.1, AD- |
| | | | | 38167.1, AD-38150.1, AD-38144.1 |
| UGAAACAUCAGC | 2716 | GCUGAUGUUUCA | 2717 | AD-38132.1, AD-38162.1, AD- |
| | | | | 38156.1, AD-38168.1, AD-38173.1, AD- |
| | | | | 38138.1, AD-38150.1, AD-38144.1 |
| GAAACAUCAGCA | 2718 | UGCUGAUGUUUC | 2719 | AD-38174.1, AD-38132.1, AD- |
| | | | | 38162.1, AD-38156.1, AD-38168.1, AD- |
| | | | | 38138.1, AD-38150.1, AD-38144.1 |
| AAACAUCAGCAA | 2720 | UUGCUGAUGUUU | 2721 | AD-38174.1, AD-38162.1, AD- |
| | | | | 35667.1, AD-38156.1, AD-38168.1, AD- |
| | | | | 38138.1, AD-38150.1, AD-38144.1 |
| AACAUCAGCAAA | 2722 | UUUGCUGAUGUU | 2723 | AD-38174.1, AD-35673.1, AD- |
| | | | | 38162.1, AD-35667.1, AD-38156.1, AD- |
| | | | | 38168.1, AD-38150.1, AD-38144.1 |
| ACAUCAGCAAAG | 2724 | CUUUGCUGAUGU | 2725 | AD-38174.1, AD-35673.1, AD- |
| | | | | 38162.1, AD-35667.1, AD-35679.1, AD- |
| | | | | 38156.1, AD-38168.1, AD-38150.1 |
| CAUCAGCAAAGA | 2726 | UCUUUGCUGAUG | 2727 | AD-35685.1, AD-38174.1, AD- |
| | | | | 35673.1, AD-38162.1, AD-35667.1, AD- |
| | | | | 35679.1, AD-38156.1, AD-38168.1 |
| AUCAGCAAAGAC | 2728 | GUCUUUGCUGAU | 2729 | AD-35685.1, AD-38174.1, AD- |
| | | | | 35673.1, AD-38162.1, AD-35667.1, AD- |
| | | | | 35679.1, AD-38168.1, AD-35691.1 |
| UCAGCAAAGACA | 2730 | UGUCUUUGCUGA | 2731 | AD-35685.1, AD-38174.1, AD- |
| | | | | 35673.1, AD-35667.1, AD-35679.1, AD- |
| | | | | 38168.1, AD-35691.1 |
| CAGCAAAGACAA | 2732 | UUGUCUUUGCUG | 2733 | AD-35685.1, AD-38174.1, AD- |
| | | | | 35673.1, AD-35667.1, AD-35679.1, AD- |
| | | | | 35691.1 |
| AGCAAAGACAAG | 2734 | CUUGUCUUUGCU | 2735 | AD-35685.1, AD-35673.1, AD- |
| | | | | 35667.1, AD-35679.1, AD-35691.1 |
| GCAAAGACAAGA | 2736 | UCUUGUCUUUGC | 2737 | AD-35685.1, AD-35673.1, AD- |
| | | | | 35679.1, AD-35691.1 |
| CAAAGACAAGAC | 2738 | GUCUUGUCUUUG | 2739 | AD-35685.1, AD-35679.1, AD-35691.1 |
| AAAGACAAGACA | 2740 | UGUCUUGUCUUU | 2741 | AD-35685.1, AD-35691.1 |

[3698] The position (“Pos”) in NM_U00336.2 is indicated. 12 exemplary nt of the overlap in the sense and anti-sense strand are presented; in many cases, the overlap is actually longer.

### Example 3

### Efficacy of KRAS RNAi Agents

[3699] KRAS RNAi agents were tested for efficacy, and the results are shown in Tables 5 and 6, below.

[3700] In Vitro Screening:

[3701] Cell Culture and Transfections:

[3702] RKO cells (ATCC, Manassas, Va.) are grown to near confluence at 37° C. in an atmosphere of 5% CO₂ in McCoy's Medium (ATCC) supplemented with 10% FBS, streptomycin, and glutamine (ATCC) before being released from the plate by trypsinization. Transfection is carried out by adding 14.8 μl of Opti-MEM plus 0.2 μl of Lipofectamine RNAiMax per well (Invitrogen, Carlsbad, Calif., cat #13778-150) to 5 μl of siRNA duplexes per well into a 96-well plate and incubated at room temperature for 15 minutes. 80 μl of complete growth media without antibiotic containing ˜2×10⁴ RKO cells are then added to the siRNA mixture. Cells are incubated for either 24 hours prior to RNA purification. Single dose experiments are performed at 10 nM and in some cases 0.1 nM final duplex concentration and dose response experiments are done at 10, 1, 0.5, 0.1, 0.05, 0.01, 0.005, 0.001, 0.0005, 0.0001, 0.00005, 0.00001 nM final duplex concentration.

[3703] Total RNA Isolation Using DYNABEADS mRNA Isolation Kit (Invitrogen, Part #: 610-12):

[3704] Cells are harvested and lysed in 150 μl of Lysis/Binding Buffer then mixed for 5 minute at 850 rpm using an Eppendorf Thermomixer (the mixing speed is the same throughout the process). Ten microliters of magnetic beads and 80 μl Lysis/Binding Buffer mixture are added to a round bottom plate and mixed for 1 minute. Magnetic beads are captured using magnetic stand and the supernatant is removed without disturbing the beads. After removing supernatant, the lysed cells are added to the remaining beads and mixed for 5 minutes. After removing supernatant, magnetic beads are washed 2 times with 150 μl Wash Buffer A and mixed for 1 minute. Beads are capture again and supernatant removed. Beads are then washed with 150 μl Wash Buffer B, captured and supernatant is removed. Beads are next washed with 150 μl Elution Buffer, captured and supernatant removed. Beads are allowed to dry for 2 minutes. After drying, 50 μl of Elution Buffer is added and mixed for 5 minutes at 70° C. Beads are captured on magnet for 5 minutes. 40 μl of supernatant is removed and added to another 96 well plate.

[3705] cDNA Synthesis Using ABI High Capacity cDNA Reverse Transcription Kit (Applied Biosystems, Foster City, Calif., Cat #4368813):

[3706] A master mix of 2 μl 10× Buffer, 0.8 μl 25×dNTPs, 2 μl Random primers, 1 μl Reverse Transcriptase, 1 μl RNase inhibitor and 3.2 μl of H₂O per reaction are added into 10 μl total RNA. cDNA is generated using a Bio-Rad C-1000 or S-1000 thermal cycler (Hercules, Calif.) through the following steps: 25° C. 10 min, 37° C. 120 min, 85° C. 5 sec, 4° C. hold.

[3707] Real Time PCR:

[3708] 2 μl of cDNA are added to a master mix containing 1 μl 18S TagMan Probe (Applied Biosystems Cat #4319413E), 1 μl KRAS TagMan probe (Applied Biosystems cat # HS00180035_m1, HS00932330_m1, or HS00610483) and 10 μl TagMan Universal PCR Master Mix (Applied Biosystems Cat #4324018) per well in a MicroAmp Optical 96 well plate (Applied Biosystems cat #4326659). Real time PCR is done in an ABI 7900HT Real Time PCR system (Applied Biosystems) using the LLCt(RQ) assay. Each duplex is tested in two independent transfections and each transfection is assayed in duplicate, unless otherwise noted in the summary tables.

[3709] Real time data are analyzed using the ΔΔCt method and normalized to assays performed with cells transfected with 10 nM AD-1955 to calculate relative fold change.

TABLE 5
KRAS RNAi agents, 0.1 and 10 nM KD at 24 hrs

| | 10 nM | | .1 nM | | | | | |
|---|---|---|---|---|---|---|---|---|
| | KRAS | | KRAS | | 10 nM | .1 nM | 10 nM | .1 nM |
| Duplex ID | bio1 | bio2 | bio1 | bio2 | SD | SD | AVG | AVG |
| AD-35613.4 | 0.332 | 0.542 | 1.814 | 1.365 | 0.1484 | 0.3177 | 0.437 | 1.589 |
| AD-35572.4 | 0.403 | 0.666 | 1.850 | 1.571 | 0.1859 | 0.1975 | 0.535 | 1.711 |
| AD-35578.4 | 0.194 | 0.905 | 0.622 | 0.485 | 0.5030 | 0.0965 | 0.550 | 0.554 |
| AD-35584.4 | 0.171 | 0.239 | 0.953 | 0.654 | 0.0480 | 0.2115 | 0.205 | 0.803 |
| AD-35590.4 | 0.167 | 0.296 | 0.988 | 0.832 | 0.0919 | 0.1105 | 0.231 | 0.910 |
| AD-35596.4 | 0.782 | 0.837 | 1.540 | 1.263 | 0.0392 | 0.1962 | 0.809 | 1.402 |
| AD-35602.4 | 1.013 | 0.915 | 1.264 | 0.934 | 0.0694 | 0.2334 | 0.964 | 1.099 |
| AD-35608.4 | 0.818 | 0.631 | 1.120 | 1.093 | 0.1321 | 0.0191 | 0.725 | 1.106 |
| AD-35614.4 | 0.898 | 1.025 | 1.929 | 1.195 | 0.0898 | 0.5194 | 0.961 | 1.562 |
| AD-35573.4 | 0.920 | 0.809 | 1.412 | 0.957 | 0.0785 | 0.3219 | 0.865 | 1.185 |
| AD-35579.4 | 0.794 | 0.946 | 1.694 | 1.244 | 0.1072 | 0.3189 | 0.870 | 1.469 |
| AD-35585.4 | 0.861 | 0.738 | 3.016 | 2.552 | 0.0870 | 0.3281 | 0.800 | 2.784 |
| AD-35591.4 | 0.458 | 0.325 | 1.238 | 1.073 | 0.0938 | 0.1162 | 0.392 | 1.156 |
| AD-35597.4 | 0.948 | 0.897 | 1.523 | 0.864 | 0.0358 | 0.4657 | 0.922 | 1.194 |
| AD-35603.4 | 0.401 | 0.405 | 0.817 | 0.618 | 0.0025 | 0.1402 | 0.403 | 0.718 |
| AD-35609.4 | 0.168 | 0.165 | 0.503 | 0.320 | 0.0022 | 0.1295 | 0.167 | 0.411 |
| AD-35615.4 | 0.555 | 0.620 | 1.397 | 0.818 | 0.0460 | 0.4099 | 0.587 | 1.108 |
| AD-35574.4 | 0.762 | 0.650 | 1.009 | 0.643 | 0.0790 | 0.2590 | 0.706 | 0.826 |
| AD-35580.1 | 0.436 | 0.398 | 1.334 | 0.768 | 0.0275 | 0.4003 | 0.417 | 1.051 |
| AD-35586.4 | 0.242 | 0.266 | 0.908 | 0.577 | 0.0175 | 0.2337 | 0.254 | 0.743 |
| AD-35592.4 | 0.212 | 0.166 | 0.600 | 0.504 | 0.0324 | 0.0685 | 0.189 | 0.552 |
| AD-35598.4 | 0.828 | 0.893 | 1.318 | 1.147 | 0.0461 | 0.1205 | 0.861 | 1.232 |
| AD-35604.4 | 0.070 | 0.179 | 0.594 | 0.496 | 0.0770 | 0.0692 | 0.124 | 0.545 |
| AD-35610.4 | 0.415 | 0.633 | 1.068 | 0.887 | 0.1537 | 0.1275 | 0.524 | 0.977 |
| AD-35616.4 | 0.159 | 0.342 | 0.300 | 0.213 | 0.1288 | 0.0610 | 0.251 | 0.256 |
| AD-35575.4 | 0.470 | 0.689 | 0.789 | 0.749 | 0.1547 | 0.0284 | 0.579 | 0.769 |
| AD-35581.4 | 0.137 | 0.288 | 0.220 | 0.196 | 0.1064 | 0.0170 | 0.212 | 0.208 |
| AD-35587.4 | 0.637 | 0.670 | 1.059 | 0.975 | 0.0231 | 0.0591 | 0.653 | 1.017 |
| AD-35593.4 | 0.200 | 0.463 | 0.724 | 0.489 | 0.1859 | 0.1661 | 0.332 | 0.607 |
| AD-35599.4 | 0.685 | 1.281 | 1.273 | 0.952 | 0.4217 | 0.2266 | 0.983 | 1.113 |
| AD-35605.4 | 0.564 | 0.798 | 1.423 | 0.897 | 0.1649 | 0.3718 | 0.681 | 1.160 |
| AD-35611.4 | 0.644 | 0.844 | 1.189 | 0.922 | 0.1418 | 0.1887 | 0.744 | 1.055 |
| AD-35617.4 | 0.219 | 0.213 | 0.594 | 0.625 | 0.0047 | 0.0220 | 0.216 | 0.609 |
| AD-35576.4 | 0.451 | 0.365 | 1.167 | 0.928 | 0.0604 | 0.1693 | 0.408 | 1.047 |
| AD-35588.4 | 0.185 | 0.290 | 0.442 | 0.323 | 0.0736 | 0.0841 | 0.237 | 0.383 |
| AD-35667.1 | 0.497 | 0.623 | 1.030 | 0.857 | 0.0897 | 0.1228 | 0.560 | 0.943 |
| AD-35673.1 | 0.367 | 0.405 | 0.771 | 0.693 | 0.0268 | 0.0547 | 0.386 | 0.732 |
| AD-35679.1 | 0.217 | 0.330 | 0.329 | 0.293 | 0.0798 | 0.0258 | 0.274 | 0.311 |
| AD-35685.1 | 0.310 | 0.255 | 0.345 | 0.339 | 0.0390 | 0.0045 | 0.283 | 0.342 |
| AD-35691.1 | 0.258 | 0.257 | 0.955 | 0.535 | 0.0005 | 0.2968 | 0.258 | 0.745 |
| AD-35557.1 | 0.843 | 0.624 | 1.056 | 0.947 | 0.1547 | 0.0766 | 0.734 | 1.002 |
| AD-35618.1 | 0.447 | 0.425 | 0.611 | 0.439 | 0.0157 | 0.1218 | 0.436 | 0.525 |
| AD-35569.1 | 0.319 | 0.404 | 0.805 | 0.715 | 0.0605 | 0.0636 | 0.362 | 0.760 |
| AD-35534.1 | 0.578 | 0.582 | 0.877 | 0.944 | 0.0028 | 0.0475 | 0.580 | 0.910 |
| AD-35582.1 | 0.518 | 0.974 | 0.982 | 0.977 | 0.3223 | 0.0035 | 0.746 | 0.980 |
| AD-35594.1 | 0.441 | 0.317 | 0.884 | 0.679 | 0.0877 | 0.1451 | 0.379 | 0.782 |
| AD-35600.1 | 0.207 | 0.394 | 0.309 | 0.233 | 0.1322 | 0.0539 | 0.301 | 0.271 |
| AD-35606.1 | 0.285 | 0.177 | 0.384 | 0.346 | 0.0770 | 0.0272 | 0.231 | 0.365 |
| AD-35612.1 | 1.070 | 0.947 | 1.027 | 0.827 | 0.0870 | 0.1415 | 1.009 | 0.927 |
| AD-38127.1 | 0.217 | 0.162 | 0.594 | 0.491 | 0.0388 | 0.0728 | 0.189 | 0.542 |
| AD-38128.1 | 0.157 | 0.146 | 0.521 | 0.366 | 0.0072 | 0.1095 | 0.151 | 0.443 |
| AD-38164.1 | 1.112 | 1.993 | 1.213 | 0.982 | 0.6224 | 0.1633 | 1.553 | 1.097 |
| AD-38165.1 | 0.619 | 0.731 | 1.002 | 0.837 | 0.0790 | 0.1173 | 0.675 | 0.920 |
| AD-38160.1 | 1.159 | 1.129 | 1.300 | 0.920 | 0.0216 | 0.2685 | 1.144 | 1.110 |
| AD-38161.1 | 0.144 | 0.125 | 0.355 | 0.319 | 0.0130 | 0.0256 | 0.134 | 0.337 |
| AD-38133.1 | 0.164 | 0.142 | 0.574 | 0.590 | 0.0154 | 0.0113 | 0.153 | 0.582 |
| AD-38170.1 | 0.147 | 0.191 | 0.734 | 0.487 | 0.0311 | 0.1744 | 0.169 | 0.611 |
| AD-38171.1 | 0.858 | 1.067 | 1.408 | 1.101 | 0.1480 | 0.2168 | 0.962 | 1.254 |
| AD-38166.1 | 0.319 | 0.486 | 0.846 | 0.848 | 0.1184 | 0.0016 | 0.402 | 0.847 |
| AD-38167.1 | 0.119 | 0.182 | 0.740 | 0.546 | 0.0440 | 0.1368 | 0.150 | 0.643 |
| AD-38139.1 | 0.148 | 0.085 | 0.259 | 0.198 | 0.0445 | 0.0433 | 0.116 | 0.229 |
| AD-38134.1 | 0.117 | 0.190 | 0.248 | 0.380 | 0.0514 | 0.0936 | 0.154 | 0.314 |
| AD-38129.1 | 0.776 | 0.860 | 1.038 | 1.089 | 0.0596 | 0.0356 | 0.818 | 1.064 |
| AD-38130.1 | 0.528 | 0.820 | 0.900 | 0.846 | 0.2064 | 0.0386 | 0.674 | 0.873 |
| AD-38172.1 | 0.076 | 0.094 | 0.289 | 0.247 | 0.0127 | 0.0298 | 0.085 | 0.268 |
| AD-38145.1 | 0.150 | 0.128 | 0.440 | 0.371 | 0.0154 | 0.0488 | 0.139 | 0.406 |
| AD-38135.1 | 0.959 | 1.429 | 0.965 | 0.900 | 0.3321 | 0.0459 | 1.194 | 0.932 |
| AD-38131.1 | 0.135 | 0.173 | 0.414 | 0.279 | 0.0267 | 0.0955 | 0.154 | 0.347 |
| AD-38173.1 | 0.609 | 0.988 | 1.132 | 1.373 | 0.2681 | 0.1707 | 0.798 | 1.253 |
| AD-38151.1 | 0.211 | 0.181 | 0.378 | 0.554 | 0.0218 | 0.1246 | 0.196 | 0.466 |
| AD-38140.1 | 0.652 | 0.794 | 1.087 | 1.045 | 0.1004 | 0.0298 | 0.723 | 1.066 |
| AD-38141.1 | 0.450 | 0.512 | 1.002 | 0.840 | 0.0433 | 0.1147 | 0.481 | 0.921 |
| AD-38136.1 | 0.053 | 0.096 | 0.150 | 0.121 | 0.0301 | 0.0199 | 0.074 | 0.136 |
| AD-38137.1 | 0.283 | 0.259 | 0.677 | 0.580 | 0.0169 | 0.0687 | 0.271 | 0.628 |
| AD-38132.1 | 0.256 | 0.333 | 0.669 | 0.726 | 0.0543 | 0.0404 | 0.294 | 0.697 |
| AD-38157.1 | 0.760 | 0.543 | 0.768 | 0.900 | 0.1536 | 0.0937 | 0.651 | 0.834 |
| AD-38146.1 | 0.249 | 0.240 | 0.617 | 0.584 | 0.0065 | 0.0237 | 0.245 | 0.600 |
| AD-38147.1 | 0.271 | 0.361 | 0.858 | 0.909 | 0.0638 | 0.0365 | 0.316 | 0.883 |
| AD-38142.1 | 0.389 | 0.634 | 0.971 | 0.712 | 0.1732 | 0.1831 | 0.512 | 0.841 |
| AD-38143.1 | 0.378 | 0.657 | 0.920 | 0.808 | 0.1966 | 0.0791 | 0.518 | 0.864 |
| AD-38163.1 | 0.088 | 0.083 | 0.143 | 0.172 | 0.0036 | 0.0206 | 0.085 | 0.158 |
| AD-38152.1 | 0.755 | 0.580 | 1.057 | 0.897 | 0.1238 | 0.1134 | 0.667 | 0.977 |
| AD-38153.1 | 0.727 | 0.781 | 0.855 | 1.006 | 0.0380 | 0.1067 | 0.754 | 0.930 |
| AD-38148.1 | 0.553 | 0.522 | 0.784 | 0.831 | 0.0215 | 0.0333 | 0.537 | 0.807 |
| AD-38149.1 | 0.269 | 0.295 | 0.607 | 0.641 | 0.0186 | 0.0242 | 0.282 | 0.624 |
| AD-38138.1 | 0.330 | 0.417 | 0.402 | 0.448 | 0.0615 | 0.0321 | 0.373 | 0.425 |
| AD-38169.1 | 0.380 | 0.248 | 0.626 | 0.540 | 0.0929 | 0.0607 | 0.314 | 0.583 |
| AD-38158.1 | 0.699 | 0.611 | 0.800 | 1.250 | 0.0619 | 0.3184 | 0.655 | 1.025 |
| AD-38159.1 | 0.161 | 0.122 | 0.210 | 0.227 | 0.0274 | 0.0123 | 0.142 | 0.219 |
| AD-38154.1 | 0.212 | 0.172 | 0.628 | 0.507 | 0.0286 | 0.0858 | 0.192 | 0.567 |
| AD-38155.1 | 0.198 | 0.215 | 0.331 | 0.309 | 0.0122 | 0.0153 | 0.207 | 0.320 |
| AD-39683.1 | 0.471 | 0.536 | 1.135 | 0.812 | 0.0461 | 0.2283 | 0.504 | 0.973 |
| AD-39689.1 | 0.630 | 0.627 | 1.148 | 0.979 | 0.0025 | 0.1194 | 0.629 | 1.064 |
| AD-39695.1 | 0.659 | 0.557 | 1.222 | 1.022 | 0.0723 | 0.1414 | 0.608 | 1.122 |
| AD-39701.1 | 1.218 | 1.231 | 0.704 | 0.724 | 0.0092 | 0.0141 | 1.225 | 0.714 |
| AD-39707.1 | 0.384 | 0.160 | 1.387 | 1.087 | 0.1584 | 0.2121 | 0.272 | 1.237 |
| AD-39713.1 | 1.157 | 0.481 | 1.128 | 1.228 | 0.4778 | 0.0707 | 0.819 | 1.178 |
| AD-39719.1 | 0.885 | 0.631 | 1.178 | 1.189 | 0.1791 | 0.0073 | 0.758 | 1.183 |
| AD-39725.1 | 1.105 | 1.074 | 1.203 | 1.751 | 0.0222 | 0.3878 | 1.089 | 1.477 |
| AD-39684.1 | 0.321 | 0.186 | 0.954 | 1.222 | 0.0952 | 0.1895 | 0.253 | 1.088 |
| AD-39690.1 | 0.825 | 0.828 | 0.832 | 0.852 | 0.0019 | 0.0139 | 0.826 | 0.842 |
| AD-39696.1 | 1.071 | 0.996 | 1.087 | 0.883 | 0.0532 | 0.1443 | 1.034 | 0.985 |
| AD-39702.1 | 0.360 | 0.334 | 1.050 | 1.285 | 0.0179 | 0.1660 | 0.347 | 1.167 |
| AD-39708.1 | 0.757 | 0.969 | 1.049 | 1.091 | 0.1494 | 0.0299 | 0.863 | 1.070 |
| AD-39714.1 | 0.953 | 1.056 | 0.779 | 0.639 | 0.0731 | 0.0995 | 1.004 | 0.709 |
| AD-39720.1 | 0.210 | 0.182 | 0.404 | 0.691 | 0.0199 | 0.2030 | 0.196 | 0.548 |
| AD-39726.1 | 0.774 | 0.968 | 0.921 | 1.068 | 0.1372 | 0.1037 | 0.871 | 0.995 |
| AD-39685.1 | 1.022 | 1.358 | 1.053 | 0.997 | 0.2378 | 0.0399 | 1.190 | 1.025 |
| AD-39691.1 | 0.494 | 0.380 | 0.913 | 0.967 | 0.0806 | 0.0379 | 0.437 | 0.940 |
| AD-39697.1 | 0.892 | 1.333 | 0.937 | 1.344 | 0.3125 | 0.2883 | 1.113 | 1.140 |
| AD-39703.1 | 1.071 | 1.141 | 0.983 | 0.864 | 0.0497 | 0.0842 | 1.106 | 0.924 |
| AD-39709.1 | 0.905 | 1.086 | 0.944 | 1.079 | 0.1284 | 0.0953 | 0.995 | 1.011 |
| AD-39715.1 | 0.347 | 0.385 | 1.398 | 1.013 | 0.0265 | 0.2722 | 0.366 | 1.205 |
| AD-39721.1 | 0.911 | 0.781 | 1.128 | 1.119 | 0.0918 | 0.0066 | 0.846 | 1.123 |
| AD-39727.1 | 0.267 | 0.271 | 0.911 | 1.038 | 0.0028 | 0.0894 | 0.269 | 0.975 |
| AD-39686.1 | 0.897 | 0.490 | 0.781 | 0.633 | 0.2877 | 0.1044 | 0.694 | 0.707 |
| AD-39692.1 | 0.936 | 0.879 | 0.814 | 0.802 | 0.0403 | 0.0083 | 0.908 | 0.808 |
| AD-39698.1 | 1.257 | 1.375 | 0.829 | 0.876 | 0.0834 | 0.0333 | 1.316 | 0.853 |
| AD-39704.1 | 1.211 | 1.189 | 0.909 | 0.735 | 0.0155 | 0.1234 | 1.200 | 0.822 |
| AD-39710.1 | 1.389 | 1.136 | 0.881 | 0.862 | 0.1789 | 0.0130 | 1.263 | 0.871 |
| AD-39716.1 | 0.787 | 0.943 | 0.991 | 0.963 | 0.1099 | 0.0199 | 0.865 | 0.977 |
| AD-39722.1 | 1.147 | 1.049 | 0.872 | 0.716 | 0.0688 | 0.1108 | 1.098 | 0.794 |
| AD-39728.1 | 0.846 | 0.974 | 0.891 | 0.928 | 0.0902 | 0.0264 | 0.910 | 0.909 |
| AD-39683.1 | 0.374 | 0.307 | 0.996 | 0.982 | 0.0469 | 0.0098 | 0.341 | 0.989 |
| AD-39687.1 | 1.015 | 0.775 | 1.035 | 1.642 | 0.1695 | 0.4296 | 0.895 | 1.338 |
| AD-39689.1 | 0.340 | 0.328 | 0.769 | 0.762 | 0.0090 | 0.0047 | 0.334 | 0.765 |
| AD-39693.1 | 1.262 | 0.832 | 0.855 | 0.967 | 0.3040 | 0.0791 | 1.047 | 0.911 |
| AD-39699.1 | 1.173 | 1.113 | 1.113 | 1.307 | 0.0423 | 0.1375 | 1.143 | 1.210 |
| AD-39705.1 | 0.622 | 0.582 | 0.730 | 0.807 | 0.0282 | 0.0542 | 0.602 | 0.768 |
| AD-39711.1 | 1.996 | 0.864 | 0.720 | 0.829 | 0.8006 | 0.0770 | 1.430 | 0.774 |
| AD-39717.1 | 0.551 | 0.523 | 1.136 | 1.064 | 0.0197 | 0.0511 | 0.537 | 1.100 |
| AD-39723.1 | 1.179 | 0.695 | 0.877 | 0.873 | 0.3428 | 0.0025 | 0.937 | 0.875 |
| AD-39729.1 | 1.083 | 0.864 | 0.898 | 0.873 | 0.1547 | 0.0178 | 0.973 | 0.885 |
| AD-39688.1 | 0.341 | 0.492 | 0.700 | 0.782 | 0.1064 | 0.0577 | 0.416 | 0.741 |
| AD-39694.1 | 0.230 | 0.327 | 0.923 | 1.087 | 0.0685 | 0.1164 | 0.279 | 1.005 |
| AD-39700.1 | 0.529 | 0.760 | 0.600 | 0.671 | 0.1631 | 0.0497 | 0.645 | 0.635 |
| AD-39706.1 | 0.180 | 0.217 | 0.447 | 0.522 | 0.0263 | 0.0528 | 0.198 | 0.484 |
| AD-39712.1 | 0.330 | 0.394 | 0.798 | 0.777 | 0.0452 | 0.0147 | 0.362 | 0.787 |
| AD-39718.1 | 0.672 | 0.798 | 0.688 | 0.724 | 0.0889 | 0.0255 | 0.735 | 0.706 |
| AD-39724.1 | 0.599 | 1.136 | 0.643 | 0.680 | 0.3804 | 0.0261 | 0.868 | 0.661 |
| AD-39730.1 | 0.996 | 1.459 | 0.848 | 0.784 | 0.3271 | 0.0448 | 1.228 | 0.816 |
| AD-39736.1 | 1.085 | 1.121 | 0.733 | 0.883 | 0.0254 | 0.1064 | 1.103 | 0.808 |
| AD-39742.1 | 0.518 | 0.561 | 0.651 | 0.703 | 0.0308 | 0.0374 | 0.539 | 0.677 |
| AD-39748.1 | 0.445 | 0.609 | 0.772 | 0.788 | 0.1163 | 0.0113 | 0.527 | 0.780 |
| AD-39754.1 | 0.549 | 0.823 | 0.691 | 0.894 | 0.1942 | 0.1438 | 0.686 | 0.793 |
| AD-39760.1 | 0.233 | 0.210 | 0.417 | 0.747 | 0.0158 | 0.2332 | 0.221 | 0.582 |
| AD-39766.1 | 0.700 | 0.882 | 0.849 | 0.836 | 0.1291 | 0.0095 | 0.791 | 0.843 |
| AD-39772.1 | 0.323 | 0.379 | 0.797 | 0.870 | 0.0393 | 0.0519 | 0.351 | 0.833 |
| AD-39731.1 | 0.804 | 0.222 | 0.452 | 0.417 | 0.4116 | 0.0251 | 0.513 | 0.434 |
| AD-39737.1 | 0.450 | 0.347 | 0.737 | 0.768 | 0.0726 | 0.0219 | 0.399 | 0.753 |
| AD-39743.1 | 0.375 | 0.533 | 0.794 | 0.852 | 0.1112 | 0.0415 | 0.454 | 0.823 |
| AD-39695.1 | 0.610 | 0.492 | 0.831 | 0.821 | 0.0836 | 0.0070 | 0.551 | 0.826 |
| AD-39749.1 | 0.292 | 0.121 | 0.545 | 0.695 | 0.1205 | 0.1059 | 0.206 | 0.620 |
| AD-39755.1 | 0.226 | 0.275 | 0.874 | 1.170 | 0.0350 | 0.2093 | 0.251 | 1.022 |
| AD-39761.1 | 0.821 | 0.841 | 0.942 | 1.101 | 0.0141 | 0.1124 | 0.831 | 1.022 |
| AD-39767.1 | 0.360 | 0.374 | 0.730 | 0.711 | 0.0097 | 0.0134 | 0.367 | 0.720 |
| AD-39773.1 | 0.223 | 0.236 | 0.802 | 1.159 | 0.0096 | 0.2520 | 0.229 | 0.980 |
| AD-39732.1 | 0.446 | 0.662 | 1.593 | 1.181 | 0.1532 | 0.2914 | 0.554 | 1.387 |
| AD-39738.1 | 0.257 | 0.147 | 1.369 | 1.482 | 0.0776 | 0.0801 | 0.202 | 1.426 |
| AD-39744.1 | 0.259 | 0.200 | 1.097 | 0.871 | 0.0414 | 0.1592 | 0.230 | 0.984 |
| AD-39750.1 | 0.182 | 0.302 | 0.642 | 0.782 | 0.0853 | 0.0988 | 0.242 | 0.712 |
| AD-39756.1 | 0.568 | 0.548 | 0.808 | 0.993 | 0.0144 | 0.1308 | 0.558 | 0.900 |
| AD-39762.1 | 0.684 | 0.916 | 0.783 | 0.929 | 0.1641 | 0.1031 | 0.800 | 0.856 |
| AD-39768.1 | 0.929 | 1.239 | 1.000 | 1.033 | 0.2194 | 0.0239 | 1.084 | 1.016 |
| AD-39774.1 | 0.391 | 0.447 | 1.087 | 1.087 | 0.0399 | 0.0003 | 0.419 | 1.087 |
| AD-39733.1 | 0.605 | 0.569 | 1.020 | 1.212 | 0.0251 | 0.1355 | 0.587 | 1.116 |
| AD-39739.1 | 0.950 | 1.271 | 0.959 | 1.030 | 0.2265 | 0.0501 | 1.111 | 0.994 |
| AD-39701.1 | 0.798 | 1.193 | 1.221 | 1.018 | 0.2794 | 0.1437 | 0.996 | 1.120 |
| AD-39745.1 | 0.257 | 0.212 | 1.116 | 1.226 | 0.0317 | 0.0779 | 0.234 | 1.171 |
| AD-39751.1 | 0.260 | 0.248 | 1.037 | 2.286 | 0.0085 | 0.8828 | 0.254 | 1.662 |
| AD-39757.1 | 0.319 | 0.566 | 1.098 | 0.949 | 0.1753 | 0.1053 | 0.443 | 1.023 |
| AD-39763.1 | 0.235 | 0.300 | 0.667 | 0.531 | 0.0463 | 0.0961 | 0.267 | 0.599 |
| AD-39769.1 | 0.637 | 0.531 | 0.526 | 0.826 | 0.0749 | 0.2120 | 0.584 | 0.676 |
| AD-39775.1 | 0.472 | 0.526 | 0.760 | 1.002 | 0.0382 | 0.1711 | 0.499 | 0.881 |
| AD-39734.1 | 0.915 | 0.920 | 0.751 | 0.837 | 0.0035 | 0.0606 | 0.917 | 0.794 |
| AD-39740.1 | 0.323 | 0.302 | 0.406 | 0.632 | 0.0145 | 0.1593 | 0.312 | 0.519 |
| AD-39746.1 | 0.553 | 0.702 | 0.949 | 1.145 | 0.1058 | 0.1382 | 0.627 | 1.047 |
| AD-39752.1 | 0.440 | 0.577 | 0.855 | 0.860 | 0.0965 | 0.0030 | 0.509 | 0.857 |
| AD-39758.1 | 1.129 | 1.095 | 0.952 | 0.830 | 0.0238 | 0.0863 | 1.112 | 0.891 |
| AD-39764.1 | 1.125 | 0.898 | 1.205 | 1.405 | 0.1606 | 0.1409 | 1.011 | 1.305 |
| AD-39770.1 | 0.647 | 0.314 | 0.672 | 0.461 | 0.2356 | 0.1486 | 0.480 | 0.566 |
| AD-39776.1 | 1.013 | 0.970 | 1.035 | 0.739 | 0.0304 | 0.2092 | 0.992 | 0.887 |
| AD-39735.1 | 0.284 | 0.201 | 0.613 | 0.976 | 0.0588 | 0.2564 | 0.242 | 0.794 |
| AD-39741.1 | 0.177 | 0.188 | 0.526 | 0.806 | 0.0074 | 0.1977 | 0.182 | 0.666 |
| AD-39747.1 | 1.047 | 0.926 | 1.247 | 1.483 | 0.0854 | 0.1666 | 0.986 | 1.365 |
| AD-39753.1 | 1.082 | 0.823 | 1.034 | 1.662 | 0.1833 | 0.4437 | 0.953 | 1.348 |
| AD-39759.1 | 0.327 | 0.292 | 0.638 | 0.412 | 0.0252 | 0.1600 | 0.309 | 0.525 |
| AD-39765.1 | 1.099 | 0.596 | 1.270 | 1.027 | 0.3554 | 0.1714 | 0.847 | 1.148 |
| AD-39771.1 | 0.238 | 0.334 | 0.801 | 0.460 | 0.0679 | 0.2407 | 0.286 | 0.631 |
| AD-39778.1 | 0.217 | 0.250 | 0.502 | 0.354 | 0.0235 | 0.1042 | 0.233 | 0.428 |
| AD-39784.1 | 0.698 | 0.598 | 1.036 | 0.944 | 0.0708 | 0.0655 | 0.648 | 0.990 |
| AD-39790.1 | 0.150 | 0.260 | 0.614 | 0.787 | 0.0777 | 0.1221 | 0.205 | 0.700 |
| AD-39796.1 | 0.635 | 0.610 | 0.731 | 0.846 | 0.0178 | 0.0813 | 0.622 | 0.788 |
| AD-39802.1 | 0.349 | 0.150 | 0.898 | 0.970 | 0.1408 | 0.0509 | 0.249 | 0.934 |
| AD-39808.1 | 0.734 | 0.972 | 1.079 | 0.955 | 0.1680 | 0.0881 | 0.853 | 1.017 |
| AD-39814.1 | 1.070 | 1.294 | 0.979 | 0.968 | 0.1588 | 0.0074 | 1.182 | 0.974 |
| AD-39820.1 | 0.381 | 0.209 | 0.786 | 0.687 | 0.1218 | 0.0701 | 0.295 | 0.737 |
| AD-39779.1 | 0.744 | 0.889 | 1.038 | 0.942 | 0.1020 | 0.0683 | 0.817 | 0.990 |
| AD-39785.1 | 0.182 | 0.218 | 0.509 | 0.506 | 0.0255 | 0.0022 | 0.200 | 0.507 |
| AD-39791.1 | 0.214 | 0.308 | 0.556 | 0.519 | 0.0667 | 0.0260 | 0.261 | 0.537 |
| AD-39797.1 | 0.341 | 0.326 | 0.788 | 0.543 | 0.0100 | 0.1730 | 0.333 | 0.665 |
| AD-39803.1 | 0.229 | 0.210 | 0.808 | 0.648 | 0.0135 | 0.1133 | 0.220 | 0.728 |
| AD-39809.1 | 0.624 | 0.829 | 1.060 | 1.031 | 0.1450 | 0.0211 | 0.727 | 1.046 |
| AD-39815.1 | 0.441 | 0.449 | 0.862 | 0.852 | 0.0057 | 0.0072 | 0.445 | 0.857 |
| AD-39821.1 | 0.582 | 0.592 | 0.722 | 0.608 | 0.0071 | 0.0806 | 0.587 | 0.665 |
| AD-39780.1 | 0.748 | 0.784 | 0.973 | 0.976 | 0.0252 | 0.0025 | 0.766 | 0.974 |
| AD-39786.1 | 0.376 | 0.455 | 0.466 | 0.640 | 0.0557 | 0.1226 | 0.416 | 0.553 |
| AD-39792.1 | 1.195 | 1.019 | 0.908 | 1.168 | 0.1249 | 0.1835 | 1.107 | 1.038 |
| AD-39798.1 | 0.429 | 0.342 | 0.933 | 0.936 | 0.0615 | 0.0020 | 0.386 | 0.934 |
| AD-39804.1 | 0.551 | 0.588 | 0.942 | 0.959 | 0.0259 | 0.0119 | 0.570 | 0.950 |
| AD-39810.1 | 0.605 | 0.532 | 0.989 | 0.956 | 0.0518 | 0.0236 | 0.568 | 0.972 |
| AD-39764.1 | 1.112 | 1.027 | 0.961 | 0.746 | 0.0602 | 0.1522 | 1.070 | 0.854 |
| AD-39816.1 | 0.805 | 0.645 | 1.014 | 0.839 | 0.1130 | 0.1236 | 0.725 | 0.927 |
| AD-39770.1 | 0.420 | 0.371 | 0.858 | 0.887 | 0.0345 | 0.0201 | 0.396 | 0.873 |
| AD-39822.1 | 0.288 | 0.313 | 0.589 | 0.494 | 0.0178 | 0.0671 | 0.301 | 0.542 |
| AD-39781.1 | 0.276 | 0.379 | 0.404 | 0.305 | 0.0725 | 0.0701 | 0.328 | 0.354 |
| AD-39787.1 | 0.982 | 1.065 | 0.675 | 0.803 | 0.0584 | 0.0909 | 1.024 | 0.739 |
| AD-39793.1 | 0.165 | 0.291 | 0.487 | 0.488 | 0.0893 | 0.0007 | 0.228 | 0.487 |
| AD-39799.1 | 0.444 | 0.540 | 0.686 | 0.746 | 0.0675 | 0.0423 | 0.492 | 0.716 |
| AD-39805.1 | 0.295 | 0.250 | 0.474 | 0.421 | 0.0320 | 0.0371 | 0.273 | 0.448 |
| AD-39811.1 | 0.646 | 0.792 | 0.892 | 0.882 | 0.1030 | 0.0070 | 0.719 | 0.887 |
| AD-39817.1 | 0.583 | 0.824 | 0.848 | 0.846 | 0.1708 | 0.0012 | 0.703 | 0.847 |
| AD-39823.1 | 1.229 | 1.075 | 1.080 | 0.859 | 0.1083 | 0.1564 | 1.152 | 0.970 |
| AD-39782.1 | 0.605 | 0.757 | 1.162 | 0.883 | 0.1076 | 0.1972 | 0.681 | 1.022 |
| AD-39788.1 | 0.257 | 0.289 | 0.665 | 0.534 | 0.0227 | 0.0926 | 0.273 | 0.599 |
| AD-39794.1 | 0.667 | 0.699 | 1.196 | 1.102 | 0.0229 | 0.0668 | 0.683 | 1.149 |
| AD-39800.1 | 0.888 | 0.734 | 1.201 | 0.908 | 0.1092 | 0.2072 | 0.811 | 1.054 |
| AD-39806.1 | 0.505 | 0.637 | 0.630 | 0.849 | 0.0935 | 0.1549 | 0.571 | 0.739 |
| AD-39812.1 | 0.281 | 0.390 | 0.521 | 0.597 | 0.0771 | 0.0538 | 0.335 | 0.559 |
| AD-39818.1 | 0.999 | 1.049 | 0.789 | 0.936 | 0.0347 | 0.1044 | 1.024 | 0.863 |
| AD-39824.1 | 1.086 | 1.053 | 1.370 | 1.034 | 0.0235 | 0.2377 | 1.070 | 1.202 |
| AD-39783.1 | 0.460 | 0.731 | 0.736 | 0.822 | 0.1916 | 0.0609 | 0.595 | 0.779 |
| AD-39789.1 | 0.859 | 1.454 | 1.139 | 1.308 | 0.4213 | 0.1195 | 1.157 | 1.224 |
| AD-39795.1 | 1.165 | 0.901 | 1.015 | 0.916 | 0.1866 | 0.0698 | 1.033 | 0.965 |
| AD-39801.1 | 1.222 | 1.191 | 1.098 | 0.843 | 0.0216 | 0.1801 | 1.207 | 0.971 |
| AD-39807.1 | 0.776 | 0.807 | 1.007 | 1.002 | 0.0215 | 0.0036 | 0.791 | 1.004 |
| AD-39813.1 | 0.923 | 1.206 | 1.008 | 0.901 | 0.1998 | 0.0753 | 1.065 | 0.955 |
| AD-39819.1 | 0.952 | 1.021 | 1.024 | 0.916 | 0.0484 | 0.0765 | 0.986 | 0.970 |
| AD-39825.1 | 0.648 | 0.864 | 1.028 | 0.981 | 0.1529 | 0.0336 | 0.756 | 1.004 |
| AD-39776.1 | 0.795 | 1.019 | 0.891 | 1.046 | 0.1581 | 0.1094 | 0.907 | 0.969 |
| AD-39831.1 | 0.648 | 0.601 | 1.018 | 1.034 | 0.0334 | 0.0119 | 0.624 | 1.026 |
| AD-39837.1 | 0.799 | 0.984 | 0.969 | 0.903 | 0.1308 | 0.0463 | 0.891 | 0.936 |
| AD-39843.1 | 0.325 | 0.385 | 0.695 | 0.572 | 0.0427 | 0.0866 | 0.355 | 0.634 |
| AD-39849.1 | 0.702 | 1.075 | 0.903 | 0.969 | 0.2638 | 0.0469 | 0.889 | 0.936 |
| AD-39855.1 | 0.309 | 0.490 | 1.202 | 0.800 | 0.1280 | 0.2840 | 0.399 | 1.001 |
| AD-39861.1 | 0.762 | 1.162 | 1.020 | 1.000 | 0.2825 | 0.0141 | 0.962 | 1.010 |
| AD-39867.1 | 0.873 | 1.162 | 1.219 | 0.918 | 0.2040 | 0.2126 | 1.017 | 1.069 |
| AD-39826.1 | 1.358 | 1.043 | 1.148 | 0.961 | 0.2226 | 0.1320 | 1.201 | 1.055 |
| AD-39832.1 | 0.792 | 1.337 | 1.214 | 0.873 | 0.3849 | 0.2413 | 1.065 | 1.043 |
| AD-39838.1 | 0.429 | 0.270 | 0.793 | 0.530 | 0.1128 | 0.1859 | 0.349 | 0.661 |
| AD-39844.1 | 0.572 | 0.789 | 0.833 | 0.692 | 0.1536 | 0.0997 | 0.680 | 0.762 |
| AD-39850.1 | 0.535 | 0.231 | 0.505 | 0.529 | 0.2152 | 0.0169 | 0.383 | 0.517 |
| AD-39856.1 | 0.323 | 0.377 | 0.835 | 0.784 | 0.0384 | 0.0359 | 0.350 | 0.810 |
| AD-39862.1 | 0.405 | 0.429 | 0.835 | 0.615 | 0.0167 | 0.1552 | 0.417 | 0.725 |
| AD-39868.1 | 0.386 | 0.484 | 0.683 | 0.643 | 0.0697 | 0.0284 | 0.435 | 0.663 |
| AD-39735.1 | 0.168 | 0.255 | 0.439 | 0.294 | 0.0616 | 0.1026 | 0.211 | 0.366 |
| AD-39827.1 | 0.202 | 0.313 | 0.616 | 0.413 | 0.0787 | 0.1432 | 0.258 | 0.515 |
| AD-39833.1 | 0.190 | 0.492 | 1.007 | 1.026 | 0.2134 | 0.0135 | 0.341 | 1.017 |
| AD-39839.1 | 0.790 | 1.002 | 1.227 | 1.327 | 0.1503 | 0.0708 | 0.896 | 1.277 |
| AD-39845.1 | 0.192 | 0.213 | 0.391 | 0.218 | 0.0147 | 0.1220 | 0.202 | 0.304 |
| AD-39851.1 | 0.779 | 0.493 | 1.243 | 0.929 | 0.2022 | 0.2220 | 0.636 | 1.086 |
| AD-39857.1 | 0.602 | 1.444 | 0.992 | 0.692 | 0.5960 | 0.2120 | 1.023 | 0.842 |
| AD-39863.1 | 0.482 | 0.135 | 0.906 | 0.632 | 0.2449 | 0.1937 | 0.308 | 0.769 |
| AD-39869.1 | 0.357 | 0.025 | 0.799 | 0.558 | 0.2347 | 0.1708 | 0.191 | 0.678 |
| AD-39828.1 | 1.185 | 1.085 | 1.176 | 0.952 | 0.0707 | 0.1585 | 1.135 | 1.064 |
| AD-39834.1 | 1.140 | 1.273 | 1.315 | 1.075 | 0.0938 | 0.1698 | 1.207 | 1.195 |
| AD-39840.1 | 0.251 | 0.541 | 0.766 | 0.591 | 0.2050 | 0.1239 | 0.396 | 0.679 |
| AD-39846.1 | 0.635 | 0.646 | 1.044 | 0.984 | 0.0077 | 0.0425 | 0.641 | 1.014 |
| AD-39852.1 | 0.434 | 0.555 | 0.707 | 0.719 | 0.0857 | 0.0085 | 0.494 | 0.713 |
| AD-39858.1 | 0.169 | 0.192 | 0.363 | 0.268 | 0.0160 | 0.0670 | 0.180 | 0.316 |
| AD-39864.1 | 1.612 | 1.161 | 0.825 | 0.919 | 0.3189 | 0.0665 | 1.387 | 0.872 |
| AD-39870.1 | 0.321 | 0.186 | 0.072 | 0.170 | 0.0952 | 0.0695 | 0.253 | 0.121 |
| AD-39829.1 | 0.283 | 0.133 | 0.353 | 0.266 | 0.1060 | 0.0611 | 0.208 | 0.310 |
| AD-39835.1 | 1.265 | 0.792 | 0.460 | 0.641 | 0.3343 | 0.1277 | 1.029 | 0.551 |
| AD-39841.1 | 0.345 | 0.267 | 0.416 | 0.369 | 0.0552 | 0.0335 | 0.306 | 0.392 |
| AD-39853.1 | 0.257 | 0.268 | 0.640 | 0.527 | 0.0081 | 0.0799 | 0.262 | 0.584 |
| AD-39859.1 | 0.316 | 0.290 | 0.773 | 0.886 | 0.0182 | 0.0801 | 0.303 | 0.830 |
| AD-39865.1 | 0.228 | 0.216 | 0.456 | 0.424 | 0.0084 | 0.0231 | 0.222 | 0.440 |
| AD-39871.1 | 0.218 | 0.338 | 0.502 | 0.571 | 0.0849 | 0.0489 | 0.278 | 0.537 |
| AD-39830.1 | 0.284 | 0.293 | 0.770 | 0.716 | 0.0063 | 0.0379 | 0.289 | 0.743 |
| AD-39836.1 | 0.267 | 0.232 | 0.615 | 0.580 | 0.0249 | 0.0254 | 0.250 | 0.598 |
| AD-39842.1 | 0.242 | 0.259 | 0.707 | 0.654 | 0.0121 | 0.0373 | 0.250 | 0.681 |
| AD-39848.1 | 0.515 | 0.591 | 1.071 | 1.012 | 0.0536 | 0.0416 | 0.553 | 1.042 |
| AD-39854.1 | 0.853 | 1.128 | 1.035 | 1.059 | 0.1943 | 0.0169 | 0.991 | 1.047 |
| AD-39860.1 | 0.969 | 1.119 | 0.965 | 0.833 | 0.1058 | 0.0936 | 1.044 | 0.899 |
| AD-39866.1 | 0.247 | 0.395 | 0.733 | 0.834 | 0.1045 | 0.0711 | 0.321 | 0.784 |
| AD-39992.1 | 0.507 | 0.837 | 0.985 | 0.990 | 0.2334 | 0.0032 | 0.672 | 0.988 |
| AD-39998.1 | 0.384 | 0.549 | 0.745 | 0.676 | 0.1167 | 0.0486 | 0.466 | 0.711 |
| AD-40004.1 | 0.509 | 0.664 | 1.090 | 1.042 | 0.1096 | 0.0340 | 0.587 | 1.066 |
| AD-40010.1 | 0.212 | 0.245 | 0.954 | 0.885 | 0.0232 | 0.0487 | 0.228 | 0.919 |
| AD-40016.1 | 0.261 | 0.514 | 0.731 | 1.050 | 0.1790 | 0.2254 | 0.387 | 0.891 |
| AD-40022.1 | 0.784 | 1.221 | 0.955 | 0.939 | 0.3089 | 0.0112 | 1.003 | 0.947 |
| AD-40028.1 | 0.907 | 1.194 | 1.062 | 0.976 | 0.2026 | 0.0608 | 1.050 | 1.019 |
| AD-40034.1 | 0.367 | 0.483 | 0.902 | 0.718 | 0.0819 | 0.1298 | 0.425 | 0.810 |
| AD-39999.1 | 0.227 | 0.339 | 0.910 | 0.837 | 0.0789 | 0.0511 | 0.283 | 0.873 |
| AD-40005.1 | 0.219 | 0.202 | 0.419 | 0.421 | 0.0121 | 0.0012 | 0.211 | 0.420 |
| AD-40011.1 | 0.470 | 0.529 | 0.731 | 0.637 | 0.0413 | 0.0663 | 0.499 | 0.684 |
| AD-40017.1 | 0.209 | 0.402 | 0.873 | 0.806 | 0.1364 | 0.0475 | 0.306 | 0.839 |
| AD-40029.1 | 0.793 | 0.821 | 0.904 | 0.834 | 0.0199 | 0.0496 | 0.807 | 0.869 |
| AD-39846.1 | 0.591 | 0.468 | 0.690 | 0.823 | 0.0867 | 0.0942 | 0.529 | 0.757 |
| AD-40035.1 | 0.872 | 1.166 | 1.079 | 1.090 | 0.2083 | 0.0081 | 1.019 | 1.085 |
| AD-39852.1 | 0.439 | 0.346 | 0.784 | 0.995 | 0.0659 | 0.1492 | 0.393 | 0.890 |
| AD-39994.1 | 0.396 | 0.517 | 0.936 | 1.097 | 0.0854 | 0.1137 | 0.457 | 1.016 |
| AD-40000.1 | 0.574 | 0.734 | 1.100 | 1.100 | 0.1133 | 0.0004 | 0.654 | 1.100 |
| AD-40006.1 | 0.402 | 0.389 | 0.831 | 0.800 | 0.0094 | 0.0223 | 0.395 | 0.815 |
| AD-40012.1 | 0.211 | 0.435 | 0.704 | 0.929 | 0.1588 | 0.1593 | 0.323 | 0.816 |
| AD-40018.1 | 0.692 | 1.163 | 0.808 | 0.933 | 0.3325 | 0.0883 | 0.928 | 0.871 |
| AD-40024.1 | 0.182 | 0.428 | 0.772 | 0.716 | 0.1739 | 0.0399 | 0.305 | 0.744 |
| AD-40030.1 | 0.437 | 0.651 | 0.825 | 0.874 | 0.1516 | 0.0344 | 0.544 | 0.849 |
| AD-40036.1 | 0.092 | 0.216 | 0.452 | 0.532 | 0.0876 | 0.0567 | 0.154 | 0.492 |
| AD-39995.1 | 0.290 | 0.686 | 0.918 | 0.618 | 0.2803 | 0.2122 | 0.488 | 0.768 |
| AD-40001.1 | 0.672 | 0.758 | 0.709 | 1.090 | 0.0607 | 0.2698 | 0.715 | 0.899 |
| AD-40007.1 | 0.785 | 0.477 | 0.780 | 0.928 | 0.2177 | 0.1048 | 0.631 | 0.854 |
| AD-40013.1 | 0.503 | 0.901 | 0.782 | 1.056 | 0.2814 | 0.1936 | 0.702 | 0.919 |
| AD-40019.1 | 0.264 | 0.125 | 0.615 | 0.731 | 0.0979 | 0.0818 | 0.194 | 0.673 |
| AD-40025.1 | 0.864 | 1.208 | 0.968 | 1.047 | 0.2430 | 0.0562 | 1.036 | 1.007 |
| AD-40031.1 | 0.268 | 0.286 | 0.995 | 0.805 | 0.0124 | 0.1344 | 0.277 | 0.900 |
| AD-40037.1 | 0.579 | 0.647 | 0.689 | 1.211 | 0.0484 | 0.3693 | 0.613 | 0.950 |
| AD-39996.1 | 0.338 | 0.400 | 0.618 | 0.680 | 0.0438 | 0.0442 | 0.369 | 0.649 |
| AD-40002.1 | 0.993 | 0.812 | 0.746 | 0.851 | 0.1281 | 0.0747 | 0.903 | 0.798 |
| AD-40008.1 | 0.227 | 0.154 | 0.309 | 0.434 | 0.0516 | 0.0879 | 0.190 | 0.372 |
| AD-40014.1 | 0.612 | 0.631 | 0.702 | 0.613 | 0.0136 | 0.0630 | 0.622 | 0.658 |
| AD-40020.1 | 0.386 | 0.409 | 0.962 | 1.008 | 0.0164 | 0.0324 | 0.398 | 0.985 |
| AD-40026.1 | 0.229 | 0.130 | 0.370 | 0.498 | 0.0702 | 0.0901 | 0.180 | 0.434 |
| AD-40032.1 | 0.421 | 0.454 | 0.979 | 0.954 | 0.0232 | 0.0176 | 0.437 | 0.966 |
| AD-40038.1 | 0.491 | 0.674 | 0.851 | 1.008 | 0.1291 | 0.1106 | 0.582 | 0.930 |
| AD-39997.1 | 0.644 | 0.860 | 0.749 | 0.878 | 0.1531 | 0.0917 | 0.752 | 0.814 |
| AD-39858.1 | 0.146 | 0.293 | 0.681 | 0.569 | 0.1043 | 0.0792 | 0.219 | 0.625 |
| AD-40009.1 | 0.191 | 0.382 | 0.912 | 1.055 | 0.1351 | 0.1012 | 0.287 | 0.984 |
| AD-40015.1 | 0.897 | 0.856 | 0.778 | 1.065 | 0.0292 | 0.2034 | 0.876 | 0.922 |
| AD-40021.1 | 0.225 | 0.282 | 0.850 | 0.658 | 0.0401 | 0.1358 | 0.254 | 0.754 |
| AD-40027.1 | 0.466 | 1.083 | 0.916 | 0.854 | 0.4358 | 0.0437 | 0.774 | 0.885 |
| AD-40033.1 | 0.278 | 0.311 | 0.426 | 0.588 | 0.0230 | 0.1150 | 0.295 | 0.507 |
| AD-40039.1 | 0.257 | 0.447 | 0.666 | 0.739 | 0.1348 | 0.0511 | 0.352 | 0.703 |
| AD-40045.1 | 0.263 | 0.147 | 0.526 | 0.945 | 0.0821 | 0.2962 | 0.205 | 0.735 |
| AD-40051.1 | 0.162 | 0.126 | 0.665 | 0.837 | 0.0255 | 0.1209 | 0.144 | 0.751 |
| AD-40057.1 | 0.150 | 0.176 | 0.641 | 0.791 | 0.0178 | 0.1066 | 0.163 | 0.716 |
| AD-40063.1 | 0.220 | 0.287 | 0.650 | 0.977 | 0.0468 | 0.2311 | 0.253 | 0.813 |
| AD-40069.1 | 0.431 | 0.559 | 0.729 | 0.922 | 0.0907 | 0.1363 | 0.495 | 0.825 |
| AD-40075.1 | 0.399 | 0.613 | 0.834 | 0.972 | 0.1511 | 0.0971 | 0.506 | 0.903 |
| AD-40081.1 | 0.287 | 0.351 | 0.499 | 0.612 | 0.0453 | 0.0795 | 0.319 | 0.556 |
| AD-40040.1 | 0.861 | 0.850 | 0.888 | 1.077 | 0.0077 | 0.1337 | 0.856 | 0.983 |
| AD-40046.1 | 0.386 | 0.397 | 0.607 | 0.634 | 0.0083 | 0.0191 | 0.392 | 0.621 |
| AD-39864.1 | 0.930 | 0.933 | 0.810 | 1.018 | 0.0022 | 0.1468 | 0.931 | 0.914 |
| AD-40052.1 | 0.272 | 0.216 | 0.526 | 0.852 | 0.0396 | 0.2299 | 0.244 | 0.689 |
| AD-40058.1 | 0.398 | 0.305 | 0.928 | 1.079 | 0.0655 | 0.1071 | 0.351 | 1.003 |
| AD-40064.1 | 0.460 | 0.208 | 0.909 | 1.083 | 0.1777 | 0.1230 | 0.334 | 0.996 |
| AD-40070.1 | 0.116 | 0.454 | 0.447 | 0.885 | 0.2390 | 0.3095 | 0.285 | 0.666 |
| AD-40076.1 | 0.396 | 1.498 | 0.634 | 1.054 | 0.7792 | 0.2969 | 0.947 | 0.844 |
| AD-40082.1 | 0.584 | 0.553 | 0.760 | 1.053 | 0.0218 | 0.2073 | 0.569 | 0.906 |
| AD-40041.1 | 0.196 | 0.241 | 0.862 | 0.978 | 0.0322 | 0.0819 | 0.218 | 0.920 |
| AD-40047.1 | 0.289 | 0.214 | 0.699 | 1.096 | 0.0535 | 0.2806 | 0.251 | 0.897 |
| AD-40053.1 | 0.973 | 1.094 | 0.717 | 1.079 | 0.0854 | 0.2560 | 1.033 | 0.898 |
| AD-40059.1 | 1.064 | 0.985 | 0.720 | 1.088 | 0.0562 | 0.2601 | 1.025 | 0.904 |
| AD-40065.1 | 0.855 | 0.863 | 0.589 | 1.020 | 0.0057 | 0.3048 | 0.859 | 0.805 |
| AD-40071.1 | 0.242 | 0.346 | 0.846 | 0.826 | 0.0739 | 0.0142 | 0.294 | 0.836 |
| AD-40077.1 | 0.249 | 0.187 | 0.649 | 0.738 | 0.0437 | 0.0633 | 0.218 | 0.693 |
| AD-40083.1 | 0.286 | 0.339 | 0.807 | 1.130 | 0.0373 | 0.2279 | 0.312 | 0.968 |
| AD-40042.1 | 0.549 | 0.288 | 1.205 | 1.288 | 0.1845 | 0.0587 | 0.418 | 1.246 |
| AD-40048.1 | 0.413 | 0.345 | 0.713 | 0.940 | 0.0483 | 0.1610 | 0.379 | 0.826 |
| AD-40054.1 | 0.278 | 0.258 | 0.685 | 0.825 | 0.0146 | 0.0989 | 0.268 | 0.755 |
| AD-40060.1 | 0.288 | 0.230 | 0.781 | 0.811 | 0.0410 | 0.0217 | 0.259 | 0.796 |
| AD-40066.1 | 0.779 | 0.829 | 0.950 | 1.284 | 0.0357 | 0.2361 | 0.804 | 1.117 |
| AD-40072.1 | 0.273 | 0.169 | 0.579 | 0.963 | 0.0738 | 0.2716 | 0.221 | 0.771 |
| AD-40078.1 | 0.747 | 0.841 | 1.177 | 1.410 | 0.0666 | 0.1645 | 0.794 | 1.294 |
| AD-40084.1 | 1.064 | 0.972 | 0.944 | 1.036 | 0.0647 | 0.0651 | 1.018 | 0.990 |
| AD-40043.1 | 0.340 | 0.313 | 0.804 | 0.795 | 0.0190 | 0.0065 | 0.327 | 0.800 |
| AD-40049.1 | 0.179 | 0.159 | 0.339 | 0.312 | 0.0141 | 0.0191 | 0.169 | 0.326 |
| AD-40055.1 | 0.243 | 0.248 | 0.811 | 0.817 | 0.0034 | 0.0044 | 0.245 | 0.814 |
| AD-40061.1 | 0.153 | 0.229 | 0.357 | 0.519 | 0.0537 | 0.1146 | 0.191 | 0.438 |
| AD-40067.1 | 0.260 | 0.141 | 0.715 | 0.692 | 0.0837 | 0.0156 | 0.201 | 0.703 |
| AD-40073.1 | 0.241 | 0.156 | 0.833 | 0.858 | 0.0597 | 0.0180 | 0.199 | 0.846 |
| AD-40079.1 | 0.236 | 0.236 | 0.694 | 0.991 | 0.0002 | 0.2099 | 0.236 | 0.842 |
| AD-40085.1 | 0.188 | 0.210 | 0.558 | 0.519 | 0.0155 | 0.0276 | 0.199 | 0.539 |
| AD-40044.1 | 0.229 | 0.126 | 0.342 | 0.506 | 0.0728 | 0.1157 | 0.178 | 0.424 |
| AD-40050.1 | 1.016 | 0.566 | 0.933 | 1.088 | 0.3183 | 0.1097 | 0.791 | 1.011 |
| AD-40056.1 | 0.274 | 0.244 | 0.801 | 1.155 | 0.0215 | 0.2506 | 0.259 | 0.978 |
| AD-40062.1 | 0.536 | 0.653 | 0.900 | 1.143 | 0.0822 | 0.1719 | 0.595 | 1.022 |
| AD-40068.1 | 0.175 | 0.131 | 0.218 | 0.438 | 0.0313 | 0.1551 | 0.153 | 0.328 |
| AD-40074.1 | 0.366 | 0.462 | 0.911 | 0.734 | 0.0674 | 0.1256 | 0.414 | 0.823 |
| AD-40080.1 | 0.273 | 0.296 | 0.844 | 0.932 | 0.0166 | 0.0623 | 0.284 | 0.888 |
| AD-40071.1 | 0.341 | 0.214 | 0.691 | 0.912 | 0.0902 | 0.1562 | 0.277 | 0.801 |
| AD-40077.1 | 0.192 | 0.180 | 0.483 | 0.404 | 0.0083 | 0.0563 | 0.186 | 0.444 |
| AD-40083.1 | 0.145 | 0.238 | 0.514 | 0.872 | 0.0657 | 0.2536 | 0.192 | 0.693 |
| AD-40042.1 | 0.403 | 0.288 | 0.626 | 0.747 | 0.0814 | 0.0856 | 0.346 | 0.686 |
| AD-35523.3 | 0.228 | 0.350 | 1.165 | 1.104 | 0.0862 | 0.0434 | 0.289 | 1.135 |
| AD-35529.1 | 0.367 | 0.368 | 1.099 | 0.831 | 0.0004 | 0.1893 | 0.368 | 0.965 |
| AD-35535.4 | 0.466 | 0.362 | 0.563 | 0.600 | 0.0735 | 0.0264 | 0.414 | 0.582 |
| AD-35541.4 | 0.585 | 0.358 | 1.003 | 0.713 | 0.1606 | 0.2052 | 0.472 | 0.858 |
| AD-35547.4 | 0.491 | 0.546 | 0.732 | 0.626 | 0.0393 | 0.0753 | 0.518 | 0.679 |
| AD-35553.4 | 0.785 | 0.690 | 1.043 | 0.744 | 0.0677 | 0.2115 | 0.738 | 0.893 |
| AD-35559.4 | 0.387 | 0.437 | 0.779 | 0.776 | 0.0357 | 0.0021 | 0.412 | 0.778 |
| AD-35565.4 | 0.549 | 0.568 | 0.930 | 1.163 | 0.0132 | 0.1647 | 0.559 | 1.046 |
| AD-35524.4 | 0.358 | 0.399 | 0.997 | 0.915 | 0.0289 | 0.0576 | 0.379 | 0.956 |
| AD-35530.4 | 0.212 | 0.406 | 1.129 | 0.981 | 0.1374 | 0.1046 | 0.309 | 1.055 |
| AD-35536.4 | 0.463 | 0.272 | 1.028 | 1.131 | 0.1352 | 0.0727 | 0.368 | 1.080 |
| AD-35542.4 | 0.573 | 0.537 | 0.804 | 0.919 | 0.0255 | 0.0808 | 0.555 | 0.861 |
| AD-35548.4 | 0.944 | 0.574 | 0.886 | 0.728 | 0.2619 | 0.1113 | 0.759 | 0.807 |
| AD-35554.4 | 0.490 | 0.393 | 1.021 | 0.679 | 0.0682 | 0.2416 | 0.442 | 0.850 |
| AD-35560.2 | 1.199 | 0.386 | 0.796 | 0.610 | 0.5748 | 0.1310 | 0.793 | 0.703 |
| AD-35566.4 | 1.082 | 0.981 | 0.747 | 0.840 | 0.0714 | 0.0652 | 1.031 | 0.794 |
| AD-35525.2 | 0.645 | 0.767 | 0.956 | 0.627 | 0.0864 | 0.2323 | 0.706 | 0.792 |
| AD-35531.4 | 0.425 | 0.328 | 0.755 | 0.776 | 0.0683 | 0.0144 | 0.376 | 0.765 |
| AD-35537.4 | 0.824 | 0.823 | 0.710 | 0.628 | 0.0004 | 0.0578 | 0.824 | 0.669 |
| AD-35543.2 | 0.232 | 0.367 | 0.980 | 0.845 | 0.0954 | 0.0949 | 0.300 | 0.912 |
| AD-35549.4 | 1.492 | 0.378 | 1.057 | 0.665 | 0.7877 | 0.2769 | 0.935 | 0.861 |
| AD-35555.4 | 0.382 | 0.460 | 1.133 | 1.096 | 0.0554 | 0.0260 | 0.421 | 1.115 |
| AD-35561.4 | 1.037 | 0.685 | 1.036 | 0.854 | 0.2488 | 0.1285 | 0.861 | 0.945 |
| AD-35567.4 | 1.437 | 0.698 | 1.098 | 0.909 | 0.5222 | 0.1337 | 1.068 | 1.004 |
| AD-35526.4 | 1.354 | 0.995 | 0.597 | 0.754 | 0.2540 | 0.1111 | 1.174 | 0.675 |
| AD-35532.4 | 0.645 | 0.312 | 1.117 | 0.944 | 0.2357 | 0.1222 | 0.479 | 1.031 |
| AD-35535.4 | 0.694 | 0.362 | 0.856 | 1.093 | 0.2353 | 0.1672 | 0.528 | 0.974 |
| AD-35538.4 | 0.280 | 0.358 | 1.121 | 0.733 | 0.0551 | 0.2744 | 0.319 | 0.927 |
| AD-35544.4 | 1.562 | 0.806 | 0.895 | 1.104 | 0.5351 | 0.1477 | 1.184 | 1.000 |
| AD-35550.4 | 0.988 | 0.683 | 0.745 | 1.159 | 0.2155 | 0.2926 | 0.836 | 0.952 |
| AD-35556.4 | 0.597 | 0.298 | 1.087 | 0.890 | 0.2119 | 0.1388 | 0.448 | 0.989 |
| AD-35562.4 | 0.412 | 0.652 | 0.796 | 0.857 | 0.1700 | 0.0436 | 0.532 | 0.826 |
| AD-35568.4 | 0.324 | 0.544 | 0.986 | 1.171 | 0.1556 | 0.1304 | 0.434 | 1.079 |
| AD-35527.4 | 0.218 | 0.272 | 1.079 | 1.097 | 0.0380 | 0.0122 | 0.245 | 1.088 |
| AD-35533.4 | 0.488 | 0.226 | 1.236 | 1.089 | 0.1848 | 0.1038 | 0.357 | 1.162 |
| AD-35539.4 | 0.821 | 0.660 | 1.065 | 1.155 | 0.1140 | 0.0637 | 0.740 | 1.110 |
| AD-35545.4 | 1.206 | 0.787 | 0.990 | 1.097 | 0.2968 | 0.0755 | 0.997 | 1.043 |
| AD-35551.4 | 0.860 | 0.404 | 1.011 | 1.078 | 0.3220 | 0.0473 | 0.632 | 1.044 |
| AD-35563.4 | 1.183 | 0.977 | 0.908 | 1.277 | 0.1461 | 0.2606 | 1.080 | 1.092 |
| AD-35528.4 | 0.955 | 0.770 | 1.094 | 0.757 | 0.1309 | 0.2387 | 0.863 | 0.926 |
| AD-35540.4 | 0.560 | 0.541 | 1.061 | 1.052 | 0.0132 | 0.0065 | 0.550 | 1.056 |
| AD-35546.4 | 0.716 | 0.605 | 1.121 | 0.996 | 0.0789 | 0.0886 | 0.660 | 1.058 |
| AD-35541.4 | 0.847 | 0.358 | 1.046 | 1.002 | 0.3458 | 0.0314 | 0.603 | 1.024 |
| AD-35552.4 | 0.468 | 0.529 | 1.057 | 1.002 | 0.0431 | 0.0391 | 0.499 | 1.029 |
| AD-35558.4 | 0.424 | 0.342 | 1.241 | 1.045 | 0.0578 | 0.1385 | 0.383 | 1.143 |
| AD-35564.4 | 0.485 | 0.438 | 0.980 | 0.968 | 0.0329 | 0.0085 | 0.461 | 0.974 |
| AD-35570.4 | 0.579 | 0.413 | 0.839 | 1.108 | 0.1175 | 0.1900 | 0.496 | 0.973 |
| AD-35571.4 | 0.476 | 0.348 | 0.818 | 0.951 | 0.0907 | 0.0943 | 0.412 | 0.885 |
| AD-35577.4 | 0.300 | 0.393 | 0.844 | 0.882 | 0.0660 | 0.0267 | 0.347 | 0.863 |
| AD-35583.4 | 1.305 | 0.679 | 0.970 | 1.085 | 0.4424 | 0.0813 | 0.992 | 1.027 |
| AD-35589.4 | 1.799 | 1.425 | 1.223 | 1.155 | 0.2646 | 0.0480 | 1.612 | 1.189 |
| AD-35595.4 | 0.504 | 0.417 | 0.976 | 1.013 | 0.0619 | 0.0261 | 0.461 | 0.995 |
| AD-35601.4 | 0.834 | 0.338 | 1.076 | 0.938 | 0.3513 | 0.0973 | 0.586 | 1.007 |
| AD-35607.4 | 0.597 | 0.419 | 1.000 | 1.074 | 0.1256 | 0.0523 | 0.508 | 1.037 |

SD = standard deviation,
AVG = average

TABLE 6
IC50 data: KRAS fold change values

| Duplex | IC50_bio1 | IC50_bio2 | AvgIC50 | SD |
|---|---|---|---|---|
| AD-39731.1 | 0.020 | 0.003 | 0.012 | 0.0122 |
| AD-39706.1 | 0.004 | 0.000 | 0.002 | 0.0028 |
| AD-39720.1 | 0.012 | 0.002 | 0.007 | 0.0070 |
| AD-39741.1 | 0.002 | 0.000 | 0.001 | 0.0015 |
| AD-39738.1 | 0.002 | 0.001 | 0.002 | 0.0008 |
| AD-39870.1 | 0.159 | 0.069 | 0.114 | 0.0636 |
| AD-39845.1 | 0.056 | 0.015 | 0.036 | 0.0294 |
| AD-39829.1 | 0.133 | 0.027 | 0.080 | 0.0750 |
| AD-39778.1 | 0.135 | 0.040 | 0.088 | 0.0670 |
| AD-39865.1 | 0.179 | 0.038 | 0.109 | 0.0996 |
| AD-39793.1 | 0.003 | 0.078 | 0.041 | 0.0526 |
| AD-39785.1 | 0.004 | 0.014 | 0.009 | 0.0068 |
| AD-40068.1 | 0.010 | 0.002 | 0.006 | 0.0052 |
| AD-40008.1 | 0.041 | 0.011 | 0.026 | 0.0217 |
| AD-40026.1 | 0.014 | 0.009 | 0.012 | 0.0036 |
| AD-40061.1 | 0.014 | 0.004 | 0.009 | 0.0068 |
| AD-40036.1 | 0.040 | 0.013 | 0.027 | 0.0196 |
| AD-40057.1 | 0.030 | 0.111 | 0.071 | 0.0577 |
| AD-35581.4 | 0.017 | 0.027 | 0.022 | 0.0071 |
| AD-35616.4 | 0.032 | 0.044 | 0.038 | 0.0091 |
| AD-35588.4 | 0.036 | 0.060 | 0.048 | 0.0164 |
| AD-35604.4 | 0.088 | 0.373 | 0.231 | 0.2015 |
| AD-35592.4 | 0.086 | 0.266 | 0.176 | 0.1270 |
| AD-35685.1 | 0.036 | 0.019 | 0.027 | 0.0120 |
| AD-38159.1 | 0.093 | 0.096 | 0.095 | 0.0027 |
| AD-38139.1 | 0.092 | 0.354 | 0.223 | 0.1849 |
| AD-38172.1 | 0.130 | 0.180 | 0.155 | 0.0352 |
| AD-38134.1 | 0.120 | 0.199 | 0.159 | 0.0557 |
| AD-38161.1 | 0.109 | 0.173 | 0.141 | 0.0448 |
| AD-38131.1 | 0.134 | 0.374 | 0.254 | 0.1699 |
| AD-38128.1 | 0.014 | 0.070 | 0.042 | 0.0394 |
| AD-38151.1 | 0.093 | 0.315 | 0.204 | 0.1571 |
| AD-38127.1 | 0.064 | 0.089 | 0.077 | 0.0177 |
| AD-38154.1 | 0.041 | 0.284 | 0.163 | 0.1721 |
| AD-38133.1 | 0.036 | 0.203 | 0.120 | 0.1182 |
| AD-38170.1 | 0.140 | 0.332 | 0.236 | 0.1352 |
| AD-38167.1 | 0.247 | 0.262 | 0.255 | 0.0104 |
| AD-39735.1 | 0.060 | 0.034 | 0.047 | 0.0186 |
| AD-39858.1 | 0.040 | 0.037 | 0.039 | 0.0016 |
| AD-39781.1 | 0.009 | 0.016 | 0.013 | 0.0043 |
| AD-39841.1 | 0.420 | 0.242 | 0.331 | 0.1255 |
| AD-39805.1 | 0.057 | 0.073 | 0.065 | 0.0114 |
| AD-39869.1 | 0.182 | 0.142 | 0.162 | 0.0281 |
| AD-39790.1 | 0.143 | 0.059 | 0.101 | 0.0595 |
| AD-40044.1 | 0.019 | 0.057 | 0.038 | 0.0265 |
| AD-40049.1 | 0.017 | 0.039 | 0.028 | 0.0154 |
| AD-40005.1 | 0.013 | 0.066 | 0.039 | 0.0372 |
| AD-40077.1 | 0.049 | 0.241 | 0.145 | 0.1358 |
| AD-40085.1 | 0.039 | 0.488 | 0.264 | 0.3173 |
| AD-40019.1 | 0.103 | 0.340 | 0.222 | 0.1677 |
| AD-40083.1 | 0.108 | 0.426 | 0.267 | 0.2253 |
| AD-35609.4 | 0.055 | 0.055 | 0.055 | 0.0001 |
| AD-35679.1 | 0.113 | 0.209 | 0.161 | 0.0673 |
| AD-35600.1 | 0.046 | 0.027 | 0.037 | 0.0134 |
| AD-35606.1 | 0.045 | 0.043 | 0.044 | 0.0018 |
| AD-38136.1 | 0.035 | 0.043 | 0.039 | 0.0061 |
| AD-38163.1 | 0.019 | 0.016 | 0.018 | 0.0017 |
| AD-38155.1 | 0.236 | 0.220 | 0.228 | 0.0118 |
| AD-38145.1 | 0.111 | 0.230 | 0.171 | 0.0842 |
| AD-38138.1 | 0.260 | 0.675 | 0.468 | 0.2933 |

SD = standard deviation,
Avg = average
Bio1: biological replicates 1 and 2; residual mRNA level relative to control.

TABLE 6.1
Efficacy of particular KRAS siRNAs.

| | 10 nM | 0.1 nM | knockdown IC50 |
|---|---|---|---|
| K-RAS siRNA | RKO | RKO | MiaPaca 2 |
| AD-35600.1 | 0.3 | 0.27 | 0.0934 |
| AD-35609.4 | 0.17 | 0.41 | 0.037049 |
| AD-38136.1 | 0.07 | 0.14 | 0.0346 |
| AD-38159.1 | 0.14 | 0.22 | 0.01861 |
| AD-38163.1 | 0.09 | 0.16 | 0.0383 |
| AD-39720.1 | 0.2 | 0.55 | 0.005496 |
| AD-39735.1 | 0.21 | 0.37 | 0.0473 |
| AD-39741.1 | 0.18 | 0.67 | 0.0394 |
| AD-39760.1 | | | 0.0806 |
| AD-39778.1 | 0.23 | 0.43 | 0.040545 |
| AD-39822.1 | | | 1.3242 |
| AD-39845.1 | 0.2 | 0.3 | 0.020622 |
| AD-39870.1 | 0.25 | 0.12 | 0.026542 |
| AD-40008.1 | 0.19 | 0.37 | 0.033536 |
| AD-40021.1 | | | 0.1217 |
| AD-40061.1 | 0.19 | 0.44 | 0.009348 |
| AD-40068.1 | 0.15 | 0.33 | 0.009477 |
| AD-40072.1 | | | 0.2838 |

[3710] Various KRAS siRNAs were tested for efficacy in RKO cells in vitro. Results are provided in Table 6.1, below. Provided are the residual gene activity at 10 nM (Column 2) and 0.1 nM (Column 3). For example, for AD-39720.1, there was a residual gene activity of 0.2, or 20% (indicating 80% gene knockdown) at 10 nM, and 0.55 or 55% (45% gene knockdown) at 0.1 nM. IC50 of knockdown in nM in MiaPaca 2 cells is also provided.

TABLE 6.2
Efficacy of particular KRAS siRNAs.

| | | | SEQ | | | |
|---|---|---|---|---|---|---|
| | | Guide 19mer | ID | Proliferation | Proliferation | IC50 |
| AlnyID | Nicknames | generic | NO: | BXPC3 | NCIH28 | MiaPaca 2 |
| AD- | NA | TCTCTATAATGGTG | 2742 | >10 | >10 | 0.0934 |
| 35600.1 | | AATAT | | | | |
| AD- | NA | AAATACACAAAGAA | 2743 | >10 | >10 | 0.037049395 |
| 35609.4 | | AGCCC | | | | |
| AD- | NA | TTTATTTCCTACTA | 2744 | >10 | >10 | 0.0346 |
| 38136.1 | | GGACC | | | | |
| AD- | hs KRAS | TTTCCTACTAGGAC | 2745 | >10 | >10 | 0.01861 |
| 38159.1 | 528 | CATAG | | | | |
| | A22S26 | | | | | |
| AD- | NA | TTTAATTTGTTCTC | 2746 | >10 | >10 | 0.0383 |
| 38163.1 | | TATAA | | | | |
| AD- | NA | AGCTCCAACTACCA | 2747 | >10 | >10 | 0.005495521 |
| 39720.1 | | CAAGT | | | | |
| AD- | hs KRAS | TCAATTACTACTTG | 2748 | >10 | >10 | 0.0473 |
| 39735.1 | 321 | CTTCC | | | | |
| | A22S26 | | | | | |
| AD- | hs KRAS | ATCAATTACTACTT | 2749 | >10 | >10 | 0.0394 |
| 39741.1 | 322 | GCTTC | | | | |
| | A22S26 | | | | | |
| AD- | NA | ATTAGCTGTATCGT | 2750 | >10 | >10 | 0.0806 |
| 39760.1 | | CAAGG | | | | |
| AD- | NA | TTCTCCATCAATTA | 2751 | >10 | >10 | 0.040544532 |
| 39778.1 | | CTACT | | | | |
| AD- | NA | TCGAGAATATCCAA | 2752 | >10 | >10 | 1.3242 |
| 39822.1 | | GAGAC | | | | |
| AD- | NA | GATTTAGTATTATT | 2753 | >10 | >10 | 0.020622331 |
| 39845.1 | | TATGG | | | | |
| AD- | NA | ATATCTTCAAATGA | 2754 | >10 | >10 | 0.026542015 |
| 39870.1 | | TTTAG | | | | |
| AD- | NA | TCTAGAAGGCAAAT | 2755 | >10 | >10 | 0.033536261 |
| 40008.1 | | CACAT | | | | |
| AD- | NA | TGTCTACTGTTCTA | 2756 | >10 | >10 | 0.1217 |
| 40021.1 | | GAAGG | | | | |
| AD- | NA | AATTCCATAACTTC | 2757 | >10 | >10 | 0.00934829 |
| 40061.1 | | TTGCT | | | | |
| AD- | NA | AATAAAAGGAATTC | 2758 | >10 | >10 | 0.009476662 |
| 40068.1 | | CATAA | | | | |
| AD- | NA | ATAACTTCTTGCTA | 2759 | >10 | >10 | 0.2838 |
| 40072.1 | | AGTCC | | | | |

Table 6.2, below, provides additional data pertaining to activity of particular KRAS siRNAs. The generic target sequence is provided. Proliferation was tested in vitro in MiaPaca2 cells, which are KRAS mutant and are therefore K-RAS dependent. IC50 was studied, using test concentrations from 0 to 10 nM. IC50 data are provided. For example, in the first row, siRNA AD-39822.1 has an IC50 of 1.3242 nM.
Proliferation was tested in both BXPC3 and NCIH28 cells, which are both Wild type for KRAS and are therefore KRAS independent. IC50 was studied, using test concentrations of 0 to 10 nM. In these studies, >10 nM IC50 indicates that the efficacy of KRAS siRNAs was specific to KRAS (little or no substantial off-target effects).

### EQUIVALENTS

[3711] A composition of embodiment 1 is a composition comprising a RNAi agent comprising a sense strand and an antisense strand, wherein the antisense strand comprises at least 15 contiguous nucleotides differing by 0, 1, 2, or 3 nucleotides from the antisense strand of a RNAi agent specific to KRAS provided in Table 1.

[3712] The composition of embodiment 1, wherein the composition further comprises a second RNAi agent to KRAS.

[3713] The composition of embodiment 1, wherein the antisense strand is 30 or fewer nucleotides in length.

[3714] The composition of embodiment 1, wherein the sense strand and the antisense strand form a duplex region 15 to 30 nucleotide pairs in length.

[3715] The composition of embodiment 1, wherein the antisense strand and the sense strand are independently 19 to 23 nucleotides in length.

[3716] The composition of embodiment 1, wherein the RNAi agent comprises a modification that causes the RNAi agent to have increased stability in a biological sample or environment.

[3717] The composition of embodiment 1, wherein the RNAi agent comprises at least one modified backbone and/or at least one 2′-modified nucleotide.

[3718] The composition of embodiment 1, wherein the RNAi agent comprises:
[3719] a) at least one 5′-uridine-adenine-3′ (5′-ua-3′) dinucleotide, wherein the uridine is a 2′-modified nucleotide; and/or
[3720] b) at least one 5′-uridine-guanine-3′ (5′-ug-3′) dinucleotide, wherein the 5′-uridine is a 2′-modified nucleotide; and/or
[3721] c) at least one 5′-cytidine-adenine-3′ (5′-ca-3′) dinucleotide, wherein the 5′-cytidine is a 2′-modified nucleotide; and/or
[3722] d) at least one 5′-uridine-uridine-3′ (5′-uu-3′) dinucleotide, wherein the 5′-uridine is a 2′-modified nucleotide.

[3723] The composition of embodiment 1, wherein the RNAi agent comprises a 2′-modification selected from the group consisting of: 2′-deoxy, 2′-deoxy-2′-fluoro, 2′-O-methyl, 2′-O-methoxyethyl (2′-O-MOE), 2′-O-aminopropyl (2′-O-AP), 2′-O-dimethylaminoethyl (2′-O-DMAOE), 2′-O-dimethylaminopropyl (2′-O-DMAP), 2′-O-dimethylaminoethyloxyethyl (2′-O-DMAEOE), and 2′-O-N-methylacetamido (2′-O-NMA).

[3724] The composition of embodiment 1, wherein the RNAi agent comprises a blunt end.

[3725] The composition of embodiment 1, wherein the RNAi agent comprises an overhang having 1 to 4 unpaired nucleotides.

[3726] The composition of embodiment 1, wherein the RNAi agent comprises an overhang at the 3′-end of the antisense strand of the RNAi agent.

[3727] The composition of embodiment 1, wherein the RNAi agent is ligated to one or more agent selected from: one or more diagnostic compound, reporter group, cross-linking agent, nuclease-resistance conferring moiety, natural or unusual nucleobase, lipophilic molecule, cholesterol, lipid, lectin, steroid, uvaol, hecigenin, diosgenin, terpene, triterpene, sarsasapogenin, Friedelin, epifriedelanol-derivatized lithocholic acid, vitamin, carbohydrate, dextran, pullulan, chitin, chitosan, synthetic carbohydrate, oligo lactate 15-mer, natural polymer, low- or medium-molecular weight polymer, inulin, cyclodextrin, hyaluronic acid, protein, protein-binding agent, integrin-targeting molecule, polycationic, peptide, polyamine, peptide mimic, and/or transferrin.

[3728] The composition of embodiment 1, wherein the RNAi agent is capable of inhibiting expression of KRAS by at least about 60% at a concentration of 10 nM in RKO cells in vitro.

[3729] The composition of embodiment 1, wherein the RNAi agent is capable of inhibiting expression of KRAS by at least about 70% at a concentration of 10 nM in RKO cells in vitro.

[3730] The composition of embodiment 1, wherein the RNAi agent is capable of inhibiting expression of KRAS by at least about 80% at a concentration of 10 nM in RKO cells in vitro.

[3731] The composition of embodiment 1, wherein the RNAi agent is capable of inhibiting expression of KRAS by at least about 90% at a concentration of 10 nM in RKO cells in vitro.

[3732] The composition of embodiment 1, wherein the RNAi agent has an EC50 of no more than about 0.1 nM.

[3733] The composition of embodiment 1, wherein the RNAi agent has an EC50 of no more than about 0.01 nM.

[3734] The composition of embodiment 1, wherein the RNAi agent has an EC50 of no more than about 0.001 nM.

[3735] A composition of embodiment 2 comprising a RNAi agent comprising a first strand and a second strand, wherein the first strand and second strand comprise at least 15 contiguous nucleotides differing by 0, 1, 2, or 3 nucleotides from the first and second strand, respectively, of a RNAi agent specific to KRAS provided in Table 1.

[3736] The composition of embodiment 2, wherein the composition comprises a second RNAi agent to KRAS.

[3737] The composition of embodiment 2, wherein the second strand is 30 or fewer nucleotides in length.

[3738] The composition of embodiment 2, wherein the first strand and the second strand form a duplex region 15 to 30 nucleotide pairs in length.

[3739] The composition of embodiment 2, wherein the first strand and the second strand are independently 19 to 23 nucleotides in length.

[3740] The composition of embodiment 2, wherein the RNAi agent comprises a modification that causes the RNAi agent to have increased stability in a biological sample or environment.

[3741] The composition of embodiment 2, wherein the RNAi agent comprises a phosphorothioate and/or a 2′-modified nucleotide.

[3742] The composition of embodiment 2, wherein the RNAi agent comprises:

[3743] at least one 5′-uridine-adenine-3′ (5′-ua-3′) dinucleotide, wherein the uridine is a 2′-modified nucleotide; and/or at least one 5′-uridine-guanine-3′ (5′-ug-3′) dinucleotide, wherein the 5′-uridine is a 2′-modified nucleotide;

[3744] and/or at least one 5′-cytidine-adenine-3′ (5′-ca-3′) dinucleotide, wherein the 5′-cytidine is a 2′-modified nucleotide;

[3745] and/or at least one 5′-uridine-uridine-3′ (5′-uu-3′) dinucleotide, wherein the 5′-uridine is a 2′-modified nucleotide.

[3746] The composition of embodiment 2, wherein the RNAi agent comprises one or more 2′-modifications selected from the group consisting of:

[3747] 2′-deoxy, 2′-deoxy-2′-fluoro, 2′-O-methyl, 2′-O-methoxyethyl (2′-O-MOE), 2′-O-aminopropyl (2′-O-AP), 2′-O-dimethylaminoethyl (2′-O-DMAOE), 2′-O-dimethylaminopropyl (2′-O-DMAP), 2′-O-dimethylaminoethyloxyethyl (2′-O-DMAEOE), and 2′-O-N-methylacetamido (2′-O-NMA).

[3748] The composition of embodiment 2, wherein the RNAi agent comprises a blunt end.

[3749] The composition of embodiment 2, wherein the RNAi agent comprises an overhang having 1 to 4 unpaired nucleotides.

[3750] The composition of embodiment 2, wherein the RNAi agent comprises an overhang at the 3′-end of the antisense strand.

[3751] The composition of embodiment 2, wherein the RNAi agent is ligated to one or more agents, the agent selected from a: one or more diagnostic compound, reporter group, cross-linking agent, nuclease-resistance conferring moiety, natural or unusual nucleobase, lipophilic molecule, cholesterol, lipid, lectin, steroid, uvaol, hecigenin, diosgenin, terpene, triterpene, sarsasapogenin, Friedelin, epifriedelanol-derivatized lithocholic acid, vitamin, carbohydrate, dextran, pullulan, chitin, chitosan, synthetic carbohydrate, oligo lactate 15-mer, natural polymer, low- or medium-molecular weight polymer, inulin, cyclodextrin, hyaluronic acid, protein, protein-binding agent, integrin-targeting molecule, polycationic, peptide, polyamine, peptide mimic, and/or transferrin.

[3752] The composition of embodiment 2, wherein the RNAi agent is capable of inhibiting expression of KRAS by at least about 60% at a concentration of 10 nM in RKO cells in vitro.

[3753] The composition of embodiment 2, wherein the RNAi agent is capable of inhibiting expression of KRAS by at least about 70% at a concentration of 10 nM in RKO cells in vitro.

[3754] The composition of embodiment 2, wherein the RNAi agent is capable of inhibiting expression of KRAS by at least about 80% at a concentration of 10 nM in RKO cells in vitro.

[3755] The composition of embodiment 2, wherein the RNAi agent is capable of inhibiting expression of KRAS by at least about 90% at a concentration of 10 nM in RKO cells in vitro.

[3756] The composition of embodiment 2, wherein the RNAi agent has an EC50 of no more than about 0.1 nM.

[3757] The composition of embodiment 2, wherein the RNAi agent has an EC50 of no more than about 0.01 nM in MiaPaca2 cells.

[3758] The composition of embodiment 2, wherein the RNAi agent has an EC50 of no more than about 0.001 nM in MiaPaca2 cells.

[3759] A method of embodiment 3 is a method comprising a method of treating a KRAS-related disease in an individual, comprising the step of administering to the individual a therapeutically effective amount of a composition comprising a RNAi agent comprising a sense strand and an antisense strand, wherein the antisense strand comprises at least 15 contiguous nucleotides differing by 0, 1, 2, or 3 nucleotides from the antisense strand of a RNAi agent specific to KRAS provided in Table 1.

[3760] The method of embodiment 3, wherein the KRAS-related disease is a proliferative disease, cardio-facio-cutaneous (CFC) syndrome or Noonan syndrome.

[3761] The method of embodiment 3, wherein the KRAS-related disease is a proliferative disease, cardio-facio-cutaneous (CFC) syndrome or Noonan syndrome.

[3762] The method of embodiment 3, wherein the method further comprises the step of administering an additional treatment for a proliferative disease, cardio-facio-cutaneous (CFC) syndrome or Noonan syndrome.

[3763] The method of embodiment 3, wherein the method further comprises the step of administering an additional treatment for a proliferative disease, including without limitation a solid or liquid cancer, adenocarcinoma, colorectal cancer, advanced and/or metastatic colorectal cancer, colon cancer, lung, non-small cell lung cancer and lung adenocarcinoma, acute myelogenous lung, bladder, brain, breast, cervical, endometrial, gastric, head and neck, kidney, leukemia, myelodysplastic syndrome, myeloid leukemia, liver, melanoma, ovarian, pancreatic, prostate, testicular, thyroid cancers, or cardio-facio-cutaneous (CFC) syndrome or Noonan syndrome.

[3764] The method of embodiment 3, wherein the composition comprises a second RNAi agent to KRAS.

[3765] The method of embodiment 3, wherein the method further comprises the step of administering an additional RNAi agent to KRAS.

[3766] The method of embodiment 3, further comprising the administration of an additional treatment.

[3767] The method of embodiment 3, wherein the additional treatment is a composition.

[3768] The method of embodiment 3, wherein the additional treatment is a method.

[3769] The method of embodiment 3, wherein the additional treatment and the RNAi agent can be administered in any order.

[3770] A method of embodiment 4 is a method comprising a method of inhibiting the expression of KRAS in an individual, comprising the step of administering to the individual a therapeutically effective amount of a composition comprising a RNAi agent comprising a sense strand and an antisense strand, wherein the antisense strand comprises at least 15 contiguous nucleotides differing by 0, 1, 2, or 3 nucleotides from the antisense strand of a RNAi agent specific to KRAS provided in Table 1.

[3771] The method of embodiment 4, wherein the individual is afflicted with or susceptible to a KRAS-related disease.

[3772] The method of embodiment 4, wherein the KRAS-related disease is a proliferative disease, cardio-facio-cutaneous (CFC) syndrome or Noonan syndrome.

[3773] The method of embodiment 4, wherein the KRAS-related disease is a proliferative disease.

[3774] The method of embodiment 4, wherein the KRAS-related disease is a proliferative disease, including without limitation a solid or liquid cancer, adenocarcinoma, colorectal cancer, advanced and/or metastatic colorectal cancer, colon cancer, lung, non-small cell lung cancer and lung adenocarcinoma, acute myelogenous lung, bladder, brain, breast, cervical, endometrial, gastric, head and neck, kidney, leukemia, myelodysplastic syndrome, myeloid leukemia, liver, melanoma, ovarian, pancreatic, prostate, testicular, thyroid cancers, or cardio-facio-cutaneous (CFC) syndrome or Noonan syndrome

[3775] The method of embodiment 4, further comprising the administration of an additional treatment.

[3776] The method of embodiment 4, wherein the additional treatment is a composition.

[3777] The method of embodiment 4, wherein the additional treatment is a method.

[3778] The method of embodiment 4, wherein the additional treatment and the RNAi agent can be administered in any order.

[3779] A composition of embodiment 5 is a composition comprising a medicament for use in an RNAi formulation comprising a RNAi agent comprising a sense strand and an antisense strand, wherein the antisense strand comprises at least 15 contiguous nucleotides differing by 0, 1, 2, or 3 nucleotides from the antisense strand of a RNAi agent specific to KRAS provided in Table 1.

[3780] Any composition above in a pharmaceutically effective formulation.

[3781] The composition according to embodiment 5, for use in a method of treating a KRAS-related disease in an individual, the method comprising the step of administering to the individual a therapeutically effective amount of a composition according to embodiment 1.

[3782] The use of a composition according to embodiment 5, in the manufacture of a medicament for the treatment of a KRAS-related disease.

[3783] The use of a composition according to embodiment 5, in the manufacture of a medicament for the treatment of a proliferative disease, including without limitation a solid or liquid cancer, adenocarcinoma, colorectal cancer, advanced and/or metastatic colorectal cancer, colon cancer, lung, non-small cell lung cancer and lung adenocarcinoma, acute myelogenous lung, bladder, brain, breast, cervical, endometrial, gastric, head and neck, kidney, leukemia, myelodysplastic syndrome, myeloid leukemia, liver, melanoma, ovarian, pancreatic, prostate, testicular, thyroid cancers, or cardio-facio-cutaneous (CFC) syndrome or Noonan syndrome.

[3784] The use of embodiment 5, wherein the KRAS-related disease is a proliferative disease, cardio-facio-cutaneous (CFC) syndrome or Noonan syndrome.

[3785] The composition of embodiment 1, wherein all the pyrimidines are 2′ O-methyl-modified nucleotides.

[3786] The composition of embodiment 1, wherein all the pyrimidines are 2′ O-methyl-modified nucleotides.

[3787] Unless defined otherwise, the technical and scientific terms used herein have the same meaning as that usually understood by a specialist familiar with the field to which the disclosure belongs.

[3788] Unless indicated otherwise, all methods, steps, techniques and manipulations that are not specifically described in detail can be performed and have been performed in a manner known per se, as will be clear to the skilled person. Reference is for example again made to the standard handbooks and the general background art mentioned herein and to the further references cited therein. Unless indicated otherwise, each of the references cited herein is incorporated in its entirety by reference.

[3789] Claims are non-limiting and are provided below.

[3790] Although particular embodiments and claims have been disclosed herein in detail, this has been done by way of example for purposes of illustration only, and is not intended to be limiting with respect to the scope of the appended claims, or the scope of subject matter of claims of any corresponding future application. In particular, it is contemplated by the inventors that various substitutions, alterations, and modifications may be made to the disclosure without departing from the spirit and scope of the disclosure as defined by the claims. The choice of nucleic acid starting material, clone of interest, or library type is believed to be a matter of routine for a person of ordinary skill in the art with knowledge of the embodiments described herein. Other aspects, advantages, and modifications considered to be within the scope of the following claims. Those skilled in the art will recognize or be able to ascertain, using no more than routine experimentation, many equivalents of the specific embodiments of the disclosure described herein. Such equivalents are intended to be encompassed by the following claims. Redrafting of claim scope in later filed corresponding applications may be due to limitations by the patent laws of various countries and should not be interpreted as giving up subject matter of the claims.

The application's sequence listing, which the Patent Office published only in electronic form, follows.

SEQUENCE LISTING (2837 sequences)

SEQ ID NO: 1 - RNA, 19 nt, Artificial Sequence
  source: /note="Description of Artificial Sequence: Synthetic oligonucleotide"
ggacgaauaugauccaaca

SEQ ID NO: 2 - RNA, 19 nt, Artificial Sequence
  source: /note="Description of Artificial Sequence: Synthetic oligonucleotide"
gacgaauaugauccaacaa

SEQ ID NO: 3 - RNA, 19 nt, Artificial Sequence
  source: /note="Description of Artificial Sequence: Synthetic oligonucleotide"
acgaauaugauccaacaau

SEQ ID NO: 4 - RNA, 19 nt, Artificial Sequence
  source: /note="Description of Artificial Sequence: Synthetic oligonucleotide"
cgaauaugauccaacaaua

SEQ ID NO: 5 - RNA, 19 nt, Artificial Sequence
  source: /note="Description of Artificial Sequence: Synthetic oligonucleotide"
gaauaugauccaacaauag

SEQ ID NO: 6 - RNA, 19 nt, Artificial Sequence
  source: /note="Description of Artificial Sequence: Synthetic oligonucleotide"
aauaugauccaacaauaga

SEQ ID NO: 7 - RNA, 19 nt, Artificial Sequence
  source: /note="Description of Artificial Sequence: Synthetic oligonucleotide"
auaugauccaacaauagag

SEQ ID NO: 8 - RNA, 19 nt, Artificial Sequence
  source: /note="Description of Artificial Sequence: Synthetic oligonucleotide"
uaugauccaacaauagagg

SEQ ID NO: 9 - RNA, 19 nt, Artificial Sequence
  source: /note="Description of Artificial Sequence: Synthetic oligonucleotide"
augauccaacaauagagga

SEQ ID NO: 10 - RNA, 19 nt, Artificial Sequence
  source: /note="Description of Artificial Sequence: Synthetic oligonucleotide"
ugauccaacaauagaggau

SEQ ID NO: 11 - RNA, 19 nt, Artificial Sequence
  source: /note="Description of Artificial Sequence: Synthetic oligonucleotide"
gauccaacaauagaggauu

SEQ ID NO: 12 - RNA, 19 nt, Artificial Sequence
  source: /note="Description of Artificial Sequence: Synthetic oligonucleotide"
auccaacaauagaggauuc

SEQ ID NO: 13 - RNA, 19 nt, Artificial Sequence
  source: /note="Description of Artificial Sequence: Synthetic oligonucleotide"
uccaacaauagaggauucc

SEQ ID NO: 14 - RNA, 19 nt, Artificial Sequence
  source: /note="Description of Artificial Sequence: Synthetic oligonucleotide"
ccaacaauagaggauuccu

SEQ ID NO: 15 - RNA, 19 nt, Artificial Sequence
  source: /note="Description of Artificial Sequence: Synthetic oligonucleotide"
caacaauagaggauuccua

SEQ ID NO: 16 - RNA, 19 nt, Artificial Sequence
  source: /note="Description of Artificial Sequence: Synthetic oligonucleotide"
aacaauagaggauuccuac

SEQ ID NO: 17 - RNA, 19 nt, Artificial Sequence
  source: /note="Description of Artificial Sequence: Synthetic oligonucleotide"
acaauagaggauuccuaca

SEQ ID NO: 18 - RNA, 19 nt, Artificial Sequence
  source: /note="Description of Artificial Sequence: Synthetic oligonucleotide"
caauagaggauuccuacag

SEQ ID NO: 19 - RNA, 19 nt, Artificial Sequence
  source: /note="Description of Artificial Sequence: Synthetic oligonucleotide"
aauagaggauuccuacagg

SEQ ID NO: 20 - RNA, 19 nt, Artificial Sequence
  source: /note="Description of Artificial Sequence: Synthetic oligonucleotide"
auagaggauuccuacagga

SEQ ID NO: 21 - RNA, 19 nt, Artificial Sequence
  source: /note="Description of Artificial Sequence: Synthetic oligonucleotide"
uagaggauuccuacaggaa

SEQ ID NO: 22 - RNA, 19 nt, Artificial Sequence
  source: /note="Description of Artificial Sequence: Synthetic oligonucleotide"
agaggauuccuacaggaag

SEQ ID NO: 23 - RNA, 19 nt, Artificial Sequence
  source: /note="Description of Artificial Sequence: Synthetic oligonucleotide"
gaggauuccuacaggaagc

SEQ ID NO: 24 - RNA, 19 nt, Artificial Sequence
  source: /note="Description of Artificial Sequence: Synthetic oligonucleotide"
aggauuccuacaggaagca

SEQ ID NO: 25 - RNA, 19 nt, Artificial Sequence
  source: /note="Description of Artificial Sequence: Synthetic oligonucleotide"
ggauuccuacaggaagcaa

SEQ ID NO: 26 - RNA, 19 nt, Artificial Sequence
  source: /note="Description of Artificial Sequence: Synthetic oligonucleotide"
gauuccuacaggaagcaag

SEQ ID NO: 27 - RNA, 19 nt, Artificial Sequence
  source: /note="Description of Artificial Sequence: Synthetic oligonucleotide"
auuccuacaggaagcaagu

SEQ ID NO: 28 - RNA, 19 nt, Artificial Sequence
  source: /note="Description of Artificial Sequence: Synthetic oligonucleotide"
uuccuacaggaagcaagua

SEQ ID NO: 29 - RNA, 19 nt, Artificial Sequence
  source: /note="Description of Artificial Sequence: Synthetic oligonucleotide"
uccuacaggaagcaaguag

SEQ ID NO: 30 - RNA, 19 nt, Artificial Sequence
  source: /note="Description of Artificial Sequence: Synthetic oligonucleotide"
ccuacaggaagcaaguagu

SEQ ID NO: 31 - RNA, 19 nt, Artificial Sequence
  source: /note="Description of Artificial Sequence: Synthetic oligonucleotide"
cuacaggaagcaaguagua

SEQ ID NO: 32 - RNA, 19 nt, Artificial Sequence
  source: /note="Description of Artificial Sequence: Synthetic oligonucleotide"
uacaggaagcaaguaguaa

SEQ ID NO: 33 - RNA, 19 nt, Artificial Sequence
  source: /note="Description of Artificial Sequence: Synthetic oligonucleotide"
acaggaagcaaguaguaau

SEQ ID NO: 34 - RNA, 19 nt, Artificial Sequence
  source: /note="Description of Artificial Sequence: Synthetic oligonucleotide"
caggaagcaaguaguaauu

SEQ ID NO: 35 - RNA, 19 nt, Artificial Sequence
  source: /note="Description of Artificial Sequence: Synthetic oligonucleotide"
uuggauauucucgacacag

SEQ ID NO: 36 - RNA, 19 nt, Artificial Sequence
  source: /note="Description of Artificial Sequence: Synthetic oligonucleotide"
uggauauucucgacacagc

SEQ ID NO: 37 - RNA, 19 nt, Artificial Sequence
  source: /note="Description of Artificial Sequence: Synthetic oligonucleotide"
ggauauucucgacacagca

SEQ ID NO: 38 - RNA, 19 nt, Artificial Sequence
  source: /note="Description of Artificial Sequence: Synthetic oligonucleotide"
auauucucgacacagcagg

SEQ ID NO: 39 - RNA, 19 nt, Artificial Sequence
  source: /note="Description of Artificial Sequence: Synthetic oligonucleotide"
auucucgacacagcagguc

SEQ ID NO: 40 - RNA, 19 nt, Artificial Sequence
  source: /note="Description of Artificial Sequence: Synthetic oligonucleotide"
ucucgacacagcaggucaa

SEQ ID NO: 41 - RNA, 19 nt, Artificial Sequence
  source: /note="Description of Artificial Sequence: Synthetic oligonucleotide"
cucgacacagcaggucaag

SEQ ID NO: 42 - RNA, 19 nt, Artificial Sequence
  source: /note="Description of Artificial Sequence: Synthetic oligonucleotide"
ucgacacagcaggucaaga

SEQ ID NO: 43 - RNA, 19 nt, Artificial Sequence
  source: /note="Description of Artificial Sequence: Synthetic oligonucleotide"
cgacacagcaggucaagag

SEQ ID NO: 44 - RNA, 19 nt, Artificial Sequence
  source: /note="Description of Artificial Sequence: Synthetic oligonucleotide"
gacacagcaggucaagagg

SEQ ID NO: 45 - RNA, 19 nt, Artificial Sequence
  source: /note="Description of Artificial Sequence: Synthetic oligonucleotide"
acacagcaggucaagagga

SEQ ID NO: 46 - RNA, 19 nt, Artificial Sequence
  source: /note="Description of Artificial Sequence: Synthetic oligonucleotide"
cacagcaggucaagaggag

SEQ ID NO: 47 - RNA, 19 nt, Artificial Sequence
  source: /note="Description of Artificial Sequence: Synthetic oligonucleotide"
acagcaggucaagaggagu

SEQ ID NO: 48 - RNA, 19 nt, Artificial Sequence
  source: /note="Description of Artificial Sequence: Synthetic oligonucleotide"
cagcaggucaagaggagua

SEQ ID NO: 49 - RNA, 19 nt, Artificial Sequence
  source: /note="Description of Artificial Sequence: Synthetic oligonucleotide"
agcaggucaagaggaguac

SEQ ID NO: 50 - RNA, 19 nt, Artificial Sequence
  source: /note="Description of Artificial Sequence: Synthetic oligonucleotide"
gcaggucaagaggaguaca

SEQ ID NO: 51 - RNA, 19 nt, Artificial Sequence
  source: /note="Description of Artificial Sequence: Synthetic oligonucleotide"
caggucaagaggaguacag

SEQ ID NO: 52 - RNA, 19 nt, Artificial Sequence
  source: /note="Description of Artificial Sequence: Synthetic oligonucleotide"
aggucaagaggaguacagu

SEQ ID NO: 53 - RNA, 19 nt, Artificial Sequence
  source: /note="Description of Artificial Sequence: Synthetic oligonucleotide"
ggucaagaggaguacagug

SEQ ID NO: 54 - RNA, 19 nt, Artificial Sequence
  source: /note="Description of Artificial Sequence: Synthetic oligonucleotide"
gucaagaggaguacagugc

SEQ ID NO: 55 - RNA, 19 nt, Artificial Sequence
  source: /note="Description of Artificial Sequence: Synthetic oligonucleotide"
ucaagaggaguacagugca

SEQ ID NO: 56 - RNA, 19 nt, Artificial Sequence
  source: /note="Description of Artificial Sequence: Synthetic oligonucleotide"
caagaggaguacagugcaa

SEQ ID NO: 57 - RNA, 19 nt, Artificial Sequence
  source: /note="Description of Artificial Sequence: Synthetic oligonucleotide"
aagaggaguacagugcaau

SEQ ID NO: 58 - RNA, 19 nt, Artificial Sequence
  source: /note="Description of Artificial Sequence: Synthetic oligonucleotide"
agaggaguacagugcaaug

SEQ ID NO: 59 - RNA, 19 nt, Artificial Sequence
  source: /note="Description of Artificial Sequence: Synthetic oligonucleotide"
gaggaguacagugcaauga

SEQ ID NO: 60 - RNA, 19 nt, Artificial Sequence
  source: /note="Description of Artificial Sequence: Synthetic oligonucleotide"
aggaguacagugcaaugag

SEQ ID NO: 61 - RNA, 19 nt, Artificial Sequence
  source: /note="Description of Artificial Sequence: Synthetic oligonucleotide"
ggaguacagugcaaugagg

SEQ ID NO: 62 - RNA, 19 nt, Artificial Sequence
  source: /note="Description of Artificial Sequence: Synthetic oligonucleotide"
gaguacagugcaaugaggg

SEQ ID NO: 63 - RNA, 19 nt, Artificial Sequence
  source: /note="Description of Artificial Sequence: Synthetic oligonucleotide"
ggggagggcuuucuuugug

SEQ ID NO: 64 - RNA, 19 nt, Artificial Sequence
  source: /note="Description of Artificial Sequence: Synthetic oligonucleotide"
gggagggcuuucuuugugu

SEQ ID NO: 65 - RNA, 19 nt, Artificial Sequence
  source: /note="Description of Artificial Sequence: Synthetic oligonucleotide"
ggagggcuuucuuugugua

SEQ ID NO: 66 - RNA, 19 nt, Artificial Sequence
  source: /note="Description of Artificial Sequence: Synthetic oligonucleotide"
gagggcuuucuuuguguau

SEQ ID NO: 67 - RNA, 19 nt, Artificial Sequence
  source: /note="Description of Artificial Sequence: Synthetic oligonucleotide"
agggcuuucuuuguguauu

SEQ ID NO: 68 - RNA, 19 nt, Artificial Sequence
  source: /note="Description of Artificial Sequence: Synthetic oligonucleotide"
gggcuuucuuuguguauuu

SEQ ID NO: 69 - RNA, 19 nt, Artificial Sequence
  source: /note="Description of Artificial Sequence: Synthetic oligonucleotide"
ggcuuucuuuguguauuug

SEQ ID NO: 70 - RNA, 19 nt, Artificial Sequence
  source: /note="Description of Artificial Sequence: Synthetic oligonucleotide"
gcuuucuuuguguauuugc

SEQ ID NO: 71 - RNA, 19 nt, Artificial Sequence
  source: /note="Description of Artificial Sequence: Synthetic oligonucleotide"
cuuucuuuguguauuugcc

SEQ ID NO: 72 - RNA, 19 nt, Artificial Sequence
  source: /note="Description of Artificial Sequence: Synthetic oligonucleotide"
uuucuuuguguauuugcca

SEQ ID NO: 73 - RNA, 19 nt, Artificial Sequence
  source: /note="Description of Artificial Sequence: Synthetic oligonucleotide"
uucuuuguguauuugccau

SEQ ID NO: 74 - RNA, 19 nt, Artificial Sequence
  source: /note="Description of Artificial Sequence: Synthetic oligonucleotide"
ucuuuguguauuugccaua

SEQ ID NO: 75 - RNA, 19 nt, Artificial Sequence
  source: /note="Description of Artificial Sequence: Synthetic oligonucleotide"
cuuuguguauuugccauaa

SEQ ID NO: 76 - RNA, 19 nt, Artificial Sequence
  source: /note="Description of Artificial Sequence: Synthetic oligonucleotide"
uuuguguauuugccauaaa

SEQ ID NO: 77 - RNA, 19 nt, Artificial Sequence
  source: /note="Description of Artificial Sequence: Synthetic oligonucleotide"
uuguguauuugccauaaau

SEQ ID NO: 78 - RNA, 19 nt, Artificial Sequence
  source: /note="Description of Artificial Sequence: Synthetic oligonucleotide"
uguguauuugccauaaaua

SEQ ID NO: 79 - RNA, 19 nt, Artificial Sequence
  source: /note="Description of Artificial Sequence: Synthetic oligonucleotide"
guguauuugccauaaauaa

SEQ ID NO: 80 - RNA, 19 nt, Artificial Sequence
  source: /note="Description of Artificial Sequence: Synthetic oligonucleotide"
uguauuugccauaaauaau

SEQ ID NO: 81 - RNA, 19 nt, Artificial Sequence
  source: /note="Description of Artificial Sequence: Synthetic oligonucleotide"
guauuugccauaaauaaua

SEQ ID NO: 82 - RNA, 19 nt, Artificial Sequence
  source: /note="Description of Artificial Sequence: Synthetic oligonucleotide"
uauuugccauaaauaauac

SEQ ID NO: 83 - RNA, 19 nt, Artificial Sequence
  source: /note="Description of Artificial Sequence: Synthetic oligonucleotide"
auuugccauaaauaauacu

SEQ ID NO: 84 - RNA, 19 nt, Artificial Sequence
  source: /note="Description of Artificial Sequence: Synthetic oligonucleotide"
uuugccauaaauaauacua

SEQ ID NO: 85 - RNA, 19 nt, Artificial Sequence
  source: /note="Description of Artificial Sequence: Synthetic oligonucleotide"
ugaagauauucaccauuau

SEQ ID NO: 86 - RNA, 19 nt, Artificial Sequence
  source: /note="Description of Artificial Sequence: Synthetic oligonucleotide"
gaagauauucaccauuaua

SEQ ID NO: 87 - RNA, 19 nt, Artificial Sequence
  source: /note="Description of Artificial Sequence: Synthetic oligonucleotide"
agauauucaccauuauaga

SEQ ID NO: 88 - RNA, 19 nt, Artificial Sequence
  source: /note="Description of Artificial Sequence: Synthetic oligonucleotide"
aaacaucagcaaagacaag

SEQ ID NO: 89 - RNA, 19 nt, Artificial Sequence
  source: /note="Description of Artificial Sequence: Synthetic oligonucleotide"
aacaucagcaaagacaaga

SEQ ID NO: 90 - RNA, 19 nt, Artificial Sequence
  source: /note="Description of Artificial Sequence: Synthetic oligonucleotide"
acaucagcaaagacaagac

SEQ ID NO: 91 - RNA, 19 nt, Artificial Sequence
  source: /note="Description of Artificial Sequence: Synthetic oligonucleotide"
caucagcaaagacaagaca

SEQ ID NO: 92 - RNA, 19 nt, Artificial Sequence
  source: /note="Description of Artificial Sequence: Synthetic oligonucleotide"
aucagcaaagacaagacag

SEQ ID NO: 93 - RNA, 19 nt, Artificial Sequence
  source: /note="Description of Artificial Sequence: Synthetic oligonucleotide"
gauauucucgacacagcag

SEQ ID NO: 94 - RNA, 19 nt, Artificial Sequence
  source: /note="Description of Artificial Sequence: Synthetic oligonucleotide"
uucaccauuauagagaaca

SEQ ID NO: 95 - RNA, 19 nt, Artificial Sequence
  source: /note="Description of Artificial Sequence: Synthetic oligonucleotide"
uauucucgacacagcaggu

SEQ ID NO: 96 - RNA, 19 nt, Artificial Sequence
  source: /note="Description of Artificial Sequence: Synthetic oligonucleotide"
uucucgacacagcagguca

SEQ ID NO: 97 - RNA, 19 nt, Artificial Sequence
  source: /note="Description of Artificial Sequence: Synthetic oligonucleotide"
aagauauucaccauuauag

SEQ ID NO: 98 - RNA, 19 nt, Artificial Sequence
  source: /note="Description of Artificial Sequence: Synthetic oligonucleotide"
gauauucaccauuauagag

SEQ ID NO: 99 - RNA, 19 nt, Artificial Sequence
  source: /note="Description of Artificial Sequence: Synthetic oligonucleotide"
auauucaccauuauagaga

SEQ ID NO: 100 - RNA, 19 nt, Artificial Sequence
  source: /note="Description of Artificial Sequence: Synthetic oligonucleotide"
uauucaccauuauagagaa

SEQ ID NO: 101 - RNA, 19 nt, Artificial Sequence
  source: /note="Description of Artificial Sequence: Synthetic oligonucleotide"
auucaccauuauagagaac

SEQ ID NO: 102 - RNA, 19 nt, Artificial Sequence
  source: /note="Description of Artificial Sequence: Synthetic oligonucleotide"
ucaccauuauagagaacaa

SEQ ID NO: 103 - RNA, 19 nt, Artificial Sequence
  source: /note="Description of Artificial Sequence: Synthetic oligonucleotide"
caccauuauagagaacaaa

SEQ ID NO: 104 - RNA, 19 nt, Artificial Sequence
  source: /note="Description of Artificial Sequence: Synthetic oligonucleotide"
accauuauagagaacaaau

SEQ ID NO: 105 - RNA, 19 nt, Artificial Sequence
  source: /note="Description of Artificial Sequence: Synthetic oligonucleotide"
ccauuauagagaacaaauu

SEQ ID NO: 106 - RNA, 19 nt, Artificial Sequence
  source: /note="Description of Artificial Sequence: Synthetic oligonucleotide"
cauuauagagaacaaauua

SEQ ID NO: 107 - RNA, 19 nt, Artificial Sequence
  source: /note="Description of Artificial Sequence: Synthetic oligonucleotide"
auuauagagaacaaauuaa

SEQ ID NO: 108 - RNA, 19 nt, Artificial Sequence
  source: /note="Description of Artificial Sequence: Synthetic oligonucleotide"
uuauagagaacaaauuaaa

SEQ ID NO: 109 - RNA, 19 nt, Artificial Sequence
  source: /note="Description of Artificial Sequence: Synthetic oligonucleotide"
uauagagaacaaauuaaaa

SEQ ID NO: 110 - RNA, 19 nt, Artificial Sequence
  source: /note="Description of Artificial Sequence: Synthetic oligonucleotide"
auagagaacaaauuaaaag

SEQ ID NO: 111 - RNA, 19 nt, Artificial Sequence
  source: /note="Description of Artificial Sequence: Synthetic oligonucleotide"
uagagaacaaauuaaaaga

SEQ ID NO: 112 - RNA, 19 nt, Artificial Sequence
  source: /note="Description of Artificial Sequence: Synthetic oligonucleotide"
agagaacaaauuaaaagag

SEQ ID NO: 113 - RNA, 19 nt, Artificial Sequence
  source: /note="Description of Artificial Sequence: Synthetic oligonucleotide"
gaagauguaccuauggucc

SEQ ID NO: 114 - RNA, 19 nt, Artificial Sequence
  source: /note="Description of Artificial Sequence: Synthetic oligonucleotide"
aagauguaccuaugguccu

SEQ ID NO: 115 - RNA, 19 nt, Artificial Sequence
  source: /note="Description of Artificial Sequence: Synthetic oligonucleotide"
agauguaccuaugguccua

SEQ ID NO: 116 - RNA, 19 nt, Artificial Sequence
  source: /note="Description of Artificial Sequence: Synthetic oligonucleotide"
gauguaccuaugguccuag

SEQ ID NO: 117 - RNA, 19 nt, Artificial Sequence
  source: /note="Description of Artificial Sequence: Synthetic oligonucleotide"
auguaccuaugguccuagu

SEQ ID NO: 118 - RNA, 19 nt, Artificial Sequence
  source: /note="Description of Artificial Sequence: Synthetic oligonucleotide"
uguaccuaugguccuagua

SEQ ID NO: 119 - RNA, 19 nt, Artificial Sequence
  source: /note="Description of Artificial Sequence: Synthetic oligonucleotide"
guaccuaugguccuaguag

SEQ ID NO: 120 - RNA, 19 nt, Artificial Sequence
  source: /note="Description of Artificial Sequence: Synthetic oligonucleotide"
uaccuaugguccuaguagg

SEQ ID NO: 121 - RNA, 19 nt, Artificial Sequence
  source: /note="Description of Artificial Sequence: Synthetic oligonucleotide"
accuaugguccuaguagga

SEQ ID NO: 122 - RNA, 19 nt, Artificial Sequence
  source: /note="Description of Artificial Sequence: Synthetic oligonucleotide"
ccuaugguccuaguaggaa

SEQ ID NO: 123 - RNA, 19 nt, Artificial Sequence
  source: /note="Description of Artificial Sequence: Synthetic oligonucleotide"
cuaugguccuaguaggaaa

SEQ ID NO: 124 - RNA, 19 nt, Artificial Sequence
  source: /note="Description of Artificial Sequence: Synthetic oligonucleotide"
uaugguccuaguaggaaau

SEQ ID NO: 125 - RNA, 19 nt, Artificial Sequence
  source: /note="Description of Artificial Sequence: Synthetic oligonucleotide"
augguccuaguaggaaaua

SEQ ID NO: 126 - RNA, 19 nt, Artificial Sequence
  source: /note="Description of Artificial Sequence: Synthetic oligonucleotide"
ugguccuaguaggaaauaa

SEQ ID NO: 127 - RNA, 19 nt, Artificial Sequence
  source: /note="Description of Artificial Sequence: Synthetic oligonucleotide"
gguccuaguaggaaauaaa

SEQ ID NO: 128 - RNA, 19 nt, Artificial Sequence
  source: /note="Description of Artificial Sequence: Synthetic oligonucleotide"
guccuaguaggaaauaaau

SEQ ID NO: 129 - RNA, 19 nt, Artificial Sequence
  source: /note="Description of Artificial Sequence: Synthetic oligonucleotide"
uccuaguaggaaauaaaug

SEQ ID NO: 130 - RNA, 19 nt, Artificial Sequence
  source: /note="Description of Artificial Sequence: Synthetic oligonucleotide"
ccuaguaggaaauaaaugu

SEQ ID NO: 131 - RNA, 19 nt, Artificial Sequence
  source: /note="Description of Artificial Sequence: Synthetic oligonucleotide"
cuaguaggaaauaaaugug

SEQ ID NO: 132 - RNA, 19 nt, Artificial Sequence
  source: /note="Description of Artificial Sequence: Synthetic oligonucleotide"
uaguaggaaauaaauguga

SEQ ID NO: 133 - RNA, 19 nt, Artificial Sequence
  source: /note="Description of Artificial Sequence: Synthetic oligonucleotide"
aguaggaaauaaaugugau

SEQ ID NO: 134 - RNA, 19 nt, Artificial Sequence
  source: /note="Description of Artificial Sequence: Synthetic oligonucleotide"
ggaauuccuuuuauugaaa

SEQ ID NO: 135 - RNA, 19 nt, Artificial Sequence
  source: /note="Description of Artificial Sequence: Synthetic oligonucleotide"
gaauuccuuuuauugaaac

SEQ ID NO: 136 - RNA, 19 nt, Artificial Sequence
  source: /note="Description of Artificial Sequence: Synthetic oligonucleotide"
aauuccuuuuauugaaaca

SEQ ID NO: 137 - RNA, 19 nt, Artificial Sequence
  source: /note="Description of Artificial Sequence: Synthetic oligonucleotide"
auuccuuuuauugaaacau

SEQ ID NO: 138 - RNA, 19 nt, Artificial Sequence
  source: /note="Description of Artificial Sequence: Synthetic oligonucleotide"
uuccuuuuauugaaacauc

SEQ ID NO: 139 - RNA, 19 nt, Artificial Sequence
  source: /note="Description of Artificial Sequence: Synthetic oligonucleotide"
uccuuuuauugaaacauca

SEQ ID NO: 140 - RNA, 19 nt, Artificial Sequence
  source: /note="Description of Artificial Sequence: Synthetic oligonucleotide"
ccuuuuauugaaacaucag

SEQ ID NO: 141 - RNA, 19 nt, Artificial Sequence
  source: /note="Description of Artificial Sequence: Synthetic oligonucleotide"
cuuuuauugaaacaucagc

SEQ ID NO: 142 - RNA, 19 nt, Artificial Sequence
  source: /note="Description of Artificial Sequence: Synthetic oligonucleotide"
uuuuauugaaacaucagca

SEQ ID NO: 143 - RNA, 19 nt, Artificial Sequence
  source: /note="Description of Artificial Sequence: Synthetic oligonucleotide"
uuuauugaaacaucagcaa

SEQ ID NO: 144 - RNA, 19 nt, Artificial Sequence
  source: /note="Description of Artificial Sequence: Synthetic oligonucleotide"
uuauugaaacaucagcaaa

SEQ ID NO: 145 - RNA, 19 nt, Artificial Sequence
  source: /note="Description of Artificial Sequence: Synthetic oligonucleotide"
uauugaaacaucagcaaag

SEQ ID NO: 146 - RNA, 19 nt, Artificial Sequence
  source: /note="Description of Artificial Sequence: Synthetic oligonucleotide"
auugaaacaucagcaaaga

SEQ ID NO: 147 - RNA, 19 nt, Artificial Sequence
  source: /note="Description of Artificial Sequence: Synthetic oligonucleotide"
uugaaacaucagcaaagac

SEQ ID NO: 148 - RNA, 19 nt, Artificial Sequence
  source: /note="Description of Artificial Sequence: Synthetic oligonucleotide"
ugaaacaucagcaaagaca

SEQ ID NO: 149 - RNA, 19 nt, Artificial Sequence
  source: /note="Description of Artificial Sequence: Synthetic oligonucleotide"
gaaacaucagcaaagacaa

SEQ ID NO: 150 - RNA, 19 nt, Artificial Sequence
  source: /note="Description of Artificial Sequence: Synthetic oligonucleotide"
augacugaauauaaacuug

SEQ ID NO: 151 - RNA, 19 nt, Artificial Sequence
  source: /note="Description of Artificial Sequence: Synthetic oligonucleotide"
ugacugaauauaaacuugu

SEQ ID NO: 152 - RNA, 19 nt, Artificial Sequence
  source: /note="Description of Artificial Sequence: Synthetic oligonucleotide"
gacugaauauaaacuugug

SEQ ID NO: 153 - RNA, 19 nt, Artificial Sequence
  source: /note="Description of Artificial Sequence: Synthetic oligonucleotide"
acugaauauaaacuugugg

SEQ ID NO: 154 - RNA, 19 nt, Artificial Sequence
  source: /note="Description of Artificial Sequence: Synthetic oligonucleotide"
cugaauauaaacuuguggu

SEQ ID NO: 155 - RNA, 19 nt, Artificial Sequence
  source: /note="Description of Artificial Sequence: Synthetic oligonucleotide"
ugaauauaaacuuguggua

SEQ ID NO: 156 - RNA, 19 nt, Artificial Sequence
  source: /note="Description of Artificial Sequence: Synthetic oligonucleotide"
gaauauaaacuugugguag

SEQ ID NO: 157 - RNA, 19 nt, Artificial Sequence
  source: /note="Description of Artificial Sequence: Synthetic oligonucleotide"
aauauaaacuugugguagu

SEQ ID NO: 158 - RNA, 19 nt, Artificial Sequence
  source: /note="Description of Artificial Sequence: Synthetic oligonucleotide"
auauaaacuugugguaguu

SEQ ID NO: 159 - RNA, 19 nt, Artificial Sequence
  source: /note="Description of Artificial Sequence: Synthetic oligonucleotide"
uauaaacuugugguaguug

SEQ ID NO: 160 - RNA, 19 nt, Artificial Sequence
  source: /note="Description of Artificial Sequence: Synthetic oligonucleotide"
auaaacuugugguaguugg

SEQ ID NO: 161 - RNA, 19 nt, Artificial Sequence
  source: /note="Description of Artificial Sequence: Synthetic oligonucleotide"
uaaacuugugguaguugga

SEQ ID NO: 162 - RNA, 19 nt, Artificial Sequence
  source: /note="Description of Artificial Sequence: Synthetic oligonucleotide"
aaacuugugguaguuggag

SEQ ID NO: 163 - RNA, 19 nt, Artificial Sequence
  source: /note="Description of Artificial Sequence: Synthetic oligonucleotide"
aacuugugguaguuggagc

SEQ ID NO: 164 - RNA, 19 nt, Artificial Sequence
  source: /note="Description of Artificial Sequence: Synthetic oligonucleotide"
acuugugguaguuggagcu

SEQ ID NO: 165 - RNA, 19 nt, Artificial Sequence
  source: /note="Description of Artificial Sequence: Synthetic oligonucleotide"
cuugugguaguuggagcug

SEQ ID NO: 166 - RNA, 19 nt, Artificial Sequence
  source: /note="Description of Artificial Sequence: Synthetic oligonucleotide"
uugugguaguuggagcugg

SEQ ID NO: 167 - RNA, 19 nt, Artificial Sequence
  source: /note="Description of Artificial Sequence: Synthetic oligonucleotide"
ugugguaguuggagcuggu

SEQ ID NO: 168 - RNA, 19 nt, Artificial Sequence
  source: /note="Description of Artificial Sequence: Synthetic oligonucleotide"
gugguaguuggagcuggug

SEQ ID NO: 169 - RNA, 19 nt, Artificial Sequence
  source: /note="Description of Artificial Sequence: Synthetic oligonucleotide"
ugguaguuggagcuggugg

SEQ ID NO: 170 - RNA, 19 nt, Artificial Sequence
  source: /note="Description of Artificial Sequence: Synthetic oligonucleotide"
gguaguuggagcugguggc

SEQ ID NO: 171 - RNA, 19 nt, Artificial Sequence
  source: /note="Description of Artificial Sequence: Synthetic oligonucleotide"
guaguuggagcugguggcg

SEQ ID NO: 172 - RNA, 19 nt, Artificial Sequence
  source: /note="Description of Artificial Sequence: Synthetic oligonucleotide"
uaguuggagcugguggcgu

SEQ ID NO: 173 - RNA, 19 nt, Artificial Sequence
  source: /note="Description of Artificial Sequence: Synthetic oligonucleotide"
aguuggagcugguggcgua

SEQ ID NO: 174 - RNA, 19 nt, Artificial Sequence
  source: /note="Description of Artificial Sequence: Synthetic oligonucleotide"
guuggagcugguggcguag

SEQ ID NO: 175 - RNA, 19 nt, Artificial Sequence
  source: /note="Description of Artificial Sequence: Synthetic oligonucleotide"
uuggagcugguggcguagg

SEQ ID NO: 176 - RNA, 19 nt, Artificial Sequence
  source: /note="Description of Artificial Sequence: Synthetic oligonucleotide"
uggagcugguggcguaggc

SEQ ID NO: 177 - RNA, 19 nt, Artificial Sequence
  source: /note="Description of Artificial Sequence: Synthetic oligonucleotide"
ggagcugguggcguaggca

SEQ ID NO: 178 - RNA, 19 nt, Artificial Sequence
  source: /note="Description of Artificial Sequence: Synthetic oligonucleotide"
gagcugguggcguaggcaa

SEQ ID NO: 179 - RNA, 19 nt, Artificial Sequence
  source: /note="Description of Artificial Sequence: Synthetic oligonucleotide"
agcugguggcguaggcaag

SEQ ID NO: 180 - RNA, 19 nt, Artificial Sequence
  source: /note="Description of Artificial Sequence: Synthetic oligonucleotide"
gcugguggcguaggcaaga

SEQ ID NO: 181 - RNA, 19 nt, Artificial Sequence
  source: /note="Description of Artificial Sequence: Synthetic oligonucleotide"
cugguggcguaggcaagag

SEQ ID NO: 182 - RNA, 19 nt, Artificial Sequence
  source: /note="Description of Artificial Sequence: Synthetic oligonucleotide"
ugguggcguaggcaagagu

SEQ ID NO: 183 - RNA, 19 nt, Artificial Sequence
  source: /note="Description of Artificial Sequence: Synthetic oligonucleotide"
gguggcguaggcaagagug

SEQ ID NO: 184 - RNA, 19 nt, Artificial Sequence
  source: /note="Description of Artificial Sequence: Synthetic oligonucleotide"
guggcguaggcaagagugc

SEQ ID NO: 185 - RNA, 19 nt, Artificial Sequence
  source: /note="Description of Artificial Sequence: Synthetic oligonucleotide"
uggcguaggcaagagugcc

SEQ ID NO: 186 - RNA, 19 nt, Artificial Sequence
  source: /note="Description of Artificial Sequence: Synthetic oligonucleotide"
ggcguaggcaagagugccu

SEQ ID NO: 187 - RNA, 19 nt, Artificial Sequence
  source: /note="Description of Artificial Sequence: Synthetic oligonucleotide"
gcguaggcaagagugccuu

SEQ ID NO: 188 - RNA, 19 nt, Artificial Sequence
  source: /note="Description of Artificial Sequence: Synthetic oligonucleotide"
cguaggcaagagugccuug

SEQ ID NO: 189 - RNA, 19 nt, Artificial Sequence
  source: /note="Description of Artificial Sequence: Synthetic oligonucleotide"
guaggcaagagugccuuga

SEQ ID NO: 190 - RNA, 19 nt, Artificial Sequence
  source: /note="Description of Artificial Sequence: Synthetic oligonucleotide"
uaggcaagagugccuugac

SEQ ID NO: 191 - RNA, 19 nt, Artificial Sequence
  source: /note="Description of Artificial Sequence: Synthetic oligonucleotide"
aggcaagagugccuugacg

SEQ ID NO: 192 - RNA, 19 nt, Artificial Sequence
  source: /note="Description of Artificial Sequence: Synthetic oligonucleotide"
ggcaagagugccuugacga

SEQ ID NO: 193 - RNA, 19 nt, Artificial Sequence
  source: /note="Description of Artificial Sequence: Synthetic oligonucleotide"
gcaagagugccuugacgau

SEQ ID NO: 194 - RNA, 19 nt, Artificial Sequence
  source: /note="Description of Artificial Sequence: Synthetic oligonucleotide"
caagagugccuugacgaua

SEQ ID NO: 195 - RNA, 19 nt, Artificial Sequence
  source: /note="Description of Artificial Sequence: Synthetic oligonucleotide"
aagagugccuugacgauac

SEQ ID NO: 196 - RNA, 19 nt, Artificial Sequence
  source: /note="Description of Artificial Sequence: Synthetic oligonucleotide"
agagugccuugacgauaca

SEQ ID NO: 197 - RNA, 19 nt, Artificial Sequence
  source: /note="Description of Artificial Sequence: Synthetic oligonucleotide"
gagugccuugacgauacag

SEQ ID NO: 198 - RNA, 19 nt, Artificial Sequence
  source: /note="Description of Artificial Sequence: Synthetic oligonucleotide"
agugccuugacgauacagc

SEQ ID NO: 199 - RNA, 19 nt, Artificial Sequence
  source: /note="Description of Artificial Sequence: Synthetic oligonucleotide"
gugccuugacgauacagcu

SEQ ID NO: 200 - RNA, 19 nt, Artificial Sequence
  source: /note="Description of Artificial Sequence: Synthetic oligonucleotide"
ugccuugacgauacagcua

SEQ ID NO: 201 - RNA, 19 nt, Artificial Sequence
  source: /note="Description of Artificial Sequence: Synthetic oligonucleotide"
gccuugacgauacagcuaa

SEQ ID NO: 202 - RNA, 19 nt, Artificial Sequence
  source: /note="Description of Artificial Sequence: Synthetic oligonucleotide"
ccuugacgauacagcuaau

SEQ ID NO: 203 - RNA, 19 nt, Artificial Sequence
  source: /note="Description of Artificial Sequence: Synthetic oligonucleotide"
cuugacgauacagcuaauu

SEQ ID NO: 204 - RNA, 19 nt, Artificial Sequence
  source: /note="Description of Artificial Sequence: Synthetic oligonucleotide"
uugacgauacagcuaauuc

SEQ ID NO: 205 - RNA, 19 nt, Artificial Sequence
  source: /note="Description of Artificial Sequence: Synthetic oligonucleotide"
ugacgauacagcuaauuca

SEQ ID NO: 206 - RNA, 19 nt, Artificial Sequence
  source: /note="Description of Artificial Sequence: Synthetic oligonucleotide"
gacgauacagcuaauucag

SEQ ID NO: 207 - RNA, 19 nt, Artificial Sequence
  source: /note="Description of Artificial Sequence: Synthetic oligonucleotide"
acgauacagcuaauucaga

SEQ ID NO: 208 - RNA, 19 nt, Artificial Sequence
  source: /note="Description of Artificial Sequence: Synthetic oligonucleotide"
cgauacagcuaauucagaa

SEQ ID NO: 209 - RNA, 19 nt, Artificial Sequence
  source: /note="Description of Artificial Sequence: Synthetic oligonucleotide"
gauacagcuaauucagaau

SEQ ID NO: 210 - RNA, 19 nt, Artificial Sequence
  source: /note="Description of Artificial Sequence: Synthetic oligonucleotide"
auacagcuaauucagaauc

SEQ ID NO: 211 - RNA, 19 nt, Artificial Sequence
  source: /note="Description of Artificial Sequence: Synthetic oligonucleotide"
uacagcuaauucagaauca

SEQ ID NO: 212 - RNA, 19 nt, Artificial Sequence
  source: /note="Description of Artificial Sequence: Synthetic oligonucleotide"
acagcuaauucagaaucau

SEQ ID NO: 213 - RNA, 19 nt, Artificial Sequence
  source: /note="Description of Artificial Sequence: Synthetic oligonucleotide"
cagcuaauucagaaucauu

SEQ ID NO: 214 - RNA, 19 nt, Artificial Sequence
  source: /note="Description of Artificial Sequence: Synthetic oligonucleotide"
agcuaauucagaaucauuu

SEQ ID NO: 215 - RNA, 19 nt, Artificial Sequence
  source: /note="Description of Artificial Sequence: Synthetic oligonucleotide"
gcuaauucagaaucauuuu

SEQ ID NO: 216 - RNA, 19 nt, Artificial Sequence
  source: /note="Description of Artificial Sequence: Synthetic oligonucleotide"
cuaauucagaaucauuuug

SEQ ID NO: 217 - RNA, 19 nt, Artificial Sequence
  source: /note="Description of Artificial Sequence: Synthetic oligonucleotide"
uaauucagaaucauuuugu

SEQ ID NO: 218 - RNA, 19 nt, Artificial Sequence
  source: /note="Description of Artificial Sequence: Synthetic oligonucleotide"
aauucagaaucauuuugug

SEQ ID NO: 219 - RNA, 19 nt, Artificial Sequence
  source: /note="Description of Artificial Sequence: Synthetic oligonucleotide"
auucagaaucauuuugugg

SEQ ID NO: 220 - RNA, 19 nt, Artificial Sequence
  source: /note="Description of Artificial Sequence: Synthetic oligonucleotide"
uucagaaucauuuugugga

SEQ ID NO: 221 - RNA, 19 nt, Artificial Sequence
  source: /note="Description of Artificial Sequence: Synthetic oligonucleotide"
ucagaaucauuuuguggac

SEQ ID NO: 222 - RNA, 19 nt, Artificial Sequence
  source: /note="Description of Artificial Sequence: Synthetic oligonucleotide"
cagaaucauuuuguggacg

SEQ ID NO: 223 - RNA, 19 nt, Artificial Sequence
  source: /note="Description of Artificial Sequence: Synthetic oligonucleotide"
agaaucauuuuguggacga

SEQ ID NO: 224 - RNA, 19 nt, Artificial Sequence
  source: /note="Description of Artificial Sequence: Synthetic oligonucleotide"
gaaucauuuuguggacgaa

SEQ ID NO: 225 - RNA, 19 nt, Artificial Sequence
  source: /note="Description of Artificial Sequence: Synthetic oligonucleotide"
aaucauuuuguggacgaau

SEQ ID NO: 226 - RNA, 19 nt, Artificial Sequence
  source: /note="Description of Artificial Sequence: Synthetic oligonucleotide"
aucauuuuguggacgaaua

SEQ ID NO: 227 - RNA, 19 nt, Artificial Sequence
  source: /note="Description of Artificial Sequence: Synthetic oligonucleotide"
ucauuuuguggacgaauau

SEQ ID NO: 228 - RNA, 19 nt, Artificial Sequence
  source: /note="Description of Artificial Sequence: Synthetic oligonucleotide"
cauuuuguggacgaauaug

SEQ ID NO: 229 - RNA, 19 nt, Artificial Sequence
  source: /note="Description of Artificial Sequence: Synthetic oligonucleotide"
auuuuguggacgaauauga

SEQ ID NO: 230 - RNA, 19 nt, Artificial Sequence
  source: /note="Description of Artificial Sequence: Synthetic oligonucleotide"
uuuuguggacgaauaugau

SEQ ID NO: 231 - RNA, 19 nt, Artificial Sequence
  source: /note="Description of Artificial Sequence: Synthetic oligonucleotide"
uuuguggacgaauaugauc

SEQ ID NO: 232 - RNA, 19 nt, Artificial Sequence
  source: /note="Description of Artificial Sequence: Synthetic oligonucleotide"
uuguggacgaauaugaucc

SEQ ID NO: 233 - RNA, 19 nt, Artificial Sequence
  source: /note="Description of Artificial Sequence: Synthetic oligonucleotide"
uguggacgaauaugaucca

SEQ ID NO: 234 - RNA, 19 nt, Artificial Sequence
  source: /note="Description of Artificial Sequence: Synthetic oligonucleotide"
guggacgaauaugauccaa

SEQ ID NO: 235 - RNA, 19 nt, Artificial Sequence
  source: /note="Description of Artificial Sequence: Synthetic oligonucleotide"
uggacgaauaugauccaac

SEQ ID NO: 236 - RNA, 19 nt, Artificial Sequence
  source: /note="Description of Artificial Sequence: Synthetic oligonucleotide"
aggaagcaaguaguaauug

SEQ ID NO: 237 - RNA, 19 nt, Artificial Sequence
  source: /note="Description of Artificial Sequence: Synthetic oligonucleotide"
ggaagcaaguaguaauuga

SEQ ID NO: 238 - RNA, 19 nt, Artificial Sequence
  source: /note="Description of Artificial Sequence: Synthetic oligonucleotide"
gaagcaaguaguaauugau

SEQ ID NO: 239 - RNA, 19 nt, Artificial Sequence
  source: /note="Description of Artificial Sequence: Synthetic oligonucleotide"
aagcaaguaguaauugaug

SEQ ID NO: 240 - RNA, 19 nt, Artificial Sequence
  source: /note="Description of Artificial Sequence: Synthetic oligonucleotide"
agcaaguaguaauugaugg

SEQ ID NO: 241 - RNA, 19 nt, Artificial Sequence
  source: /note="Description of Artificial Sequence: Synthetic oligonucleotide"
gcaaguaguaauugaugga

SEQ ID NO: 242 - RNA, 19 nt, Artificial Sequence
  source: /note="Description of Artificial Sequence: Synthetic oligonucleotide"
caaguaguaauugauggag

SEQ ID NO: 243 - RNA, 19 nt, Artificial Sequence
  source: /note="Description of Artificial Sequence: Synthetic oligonucleotide"
aaguaguaauugauggaga

SEQ ID NO: 244 - RNA, 19 nt, Artificial Sequence
  source: /note="Description of Artificial Sequence: Synthetic oligonucleotide"
aguaguaauugauggagaa

SEQ ID NO: 245 - RNA, 19 nt, Artificial Sequence
  source: /note="Description of Artificial Sequence: Synthetic oligonucleotide"
guaguaauugauggagaaa

SEQ ID NO: 246 - RNA, 19 nt, Artificial Sequence
  source: /note="Description of Artificial Sequence: Synthetic oligonucleotide"
uaguaauugauggagaaac

SEQ ID NO: 247 - RNA, 19 nt, Artificial Sequence
  source: /note="Description of Artificial Sequence: Synthetic oligonucleotide"
aguaauugauggagaaacc

SEQ ID NO: 248 - RNA, 19 nt, Artificial Sequence
  source: /note="Description of Artificial Sequence: Synthetic oligonucleotide"
guaauugauggagaaaccu

SEQ ID NO: 249 - RNA, 19 nt, Artificial Sequence
  source: /note="Description of Artificial Sequence: Synthetic oligonucleotide"
uaauugauggagaaaccug

SEQ ID NO: 250 - RNA, 19 nt, Artificial Sequence
  source: /note="Description of Artificial Sequence: Synthetic oligonucleotide"
aauugauggagaaaccugu

SEQ ID NO: 251 - RNA, 19 nt, Artificial Sequence
  source: /note="Description of Artificial Sequence: Synthetic oligonucleotide"
auugauggagaaaccuguc

SEQ ID NO: 252 - RNA, 19 nt, Artificial Sequence
  source: /note="Description of Artificial Sequence: Synthetic oligonucleotide"
uugauggagaaaccugucu

SEQ ID NO: 253 - RNA, 19 nt, Artificial Sequence
  source: /note="Description of Artificial Sequence: Synthetic oligonucleotide"
ugauggagaaaccugucuc

SEQ ID NO: 254 - RNA, 19 nt, Artificial Sequence
  source: /note="Description of Artificial Sequence: Synthetic oligonucleotide"
gauggagaaaccugucucu

SEQ ID NO: 255 - RNA, 19 nt, Artificial Sequence
  source: /note="Description of Artificial Sequence: Synthetic oligonucleotide"
auggagaaaccugucucuu

SEQ ID NO: 256 - RNA, 19 nt, Artificial Sequence
  source: /note="Description of Artificial Sequence: Synthetic oligonucleotide"
uggagaaaccugucucuug

SEQ ID NO: 257 - RNA, 19 nt, Artificial Sequence
  source: /note="Description of Artificial Sequence: Synthetic oligonucleotide"
ggagaaaccugucucuugg

SEQ ID NO: 258 - RNA, 19 nt, Artificial Sequence
  source: /note="Description of Artificial Sequence: Synthetic oligonucleotide"
gagaaaccugucucuugga

SEQ ID NO: 259 - RNA, 19 nt, Artificial Sequence
  source: /note="Description of Artificial Sequence: Synthetic oligonucleotide"
agaaaccugucucuuggau

SEQ ID NO: 260 - RNA, 19 nt, Artificial Sequence
  source: /note="Description of Artificial Sequence: Synthetic oligonucleotide"
gaaaccugucucuuggaua

SEQ ID NO: 261 - RNA, 19 nt, Artificial Sequence
  source: /note="Description of Artificial Sequence: Synthetic oligonucleotide"
aaaccugucucuuggauau

SEQ ID NO: 262 - RNA, 19 nt, Artificial Sequence
  source: /note="Description of Artificial Sequence: Synthetic oligonucleotide"
aaccugucucuuggauauu

SEQ ID NO: 263 - RNA, 19 nt, Artificial Sequence
  source: /note="Description of Artificial Sequence: Synthetic oligonucleotide"
accugucucuuggauauuc

SEQ ID NO: 264 - RNA, 19 nt, Artificial Sequence
  source: /note="Description of Artificial Sequence: Synthetic oligonucleotide"
ccugucucuuggauauucu

SEQ ID NO: 265 - RNA, 19 nt, Artificial Sequence
  source: /note="Description of Artificial Sequence: Synthetic oligonucleotide"
cugucucuuggauauucuc

SEQ ID NO: 266 - RNA, 19 nt, Artificial Sequence
  source: /note="Description of Artificial Sequence: Synthetic oligonucleotide"
ugucucuuggauauucucg

SEQ ID NO: 267 - RNA, 19 nt, Artificial Sequence
  source: /note="Description of Artificial Sequence: Synthetic oligonucleotide"
gucucuuggauauucucga

SEQ ID NO: 268 - RNA, 19 nt, Artificial Sequence
  source: /note="Description of Artificial Sequence: Synthetic oligonucleotide"
ucucuuggauauucucgac

SEQ ID NO: 269 - RNA, 19 nt, Artificial Sequence
  source: /note="Description of Artificial Sequence: Synthetic oligonucleotide"
cucuuggauauucucgaca

SEQ ID NO: 270 - RNA, 19 nt, Artificial Sequence
  source: /note="Description of Artificial Sequence: Synthetic oligonucleotide"
ucuuggauauucucgacac

SEQ ID NO: 271 - RNA, 19 nt, Artificial Sequence
  source: /note="Description of Artificial Sequence: Synthetic oligonucleotide"
cuuggauauucucgacaca

SEQ ID NO: 272 - RNA, 19 nt, Artificial Sequence
  source: /note="Description of Artificial Sequence: Synthetic oligonucleotide"
aguacagugcaaugaggga

SEQ ID NO: 273 - RNA, 19 nt, Artificial Sequence
  source: /note="Description of Artificial Sequence: Synthetic oligonucleotide"
guacagugcaaugagggac

SEQ ID NO: 274 - RNA, 19 nt, Artificial Sequence
  source: /note="Description of Artificial Sequence: Synthetic oligonucleotide"
uacagugcaaugagggacc

SEQ ID NO: 275 - RNA, 19 nt, Artificial Sequence
  source: /note="Description of Artificial Sequence: Synthetic oligonucleotide"
acagugcaaugagggacca

SEQ ID NO: 276 - RNA, 19 nt, Artificial Sequence
  source: /note="Description of Artificial Sequence: Synthetic oligonucleotide"
cagugcaaugagggaccag

SEQ ID NO: 277 - RNA, 19 nt, Artificial Sequence
  source: /note="Description of Artificial Sequence: Synthetic oligonucleotide"
agugcaaugagggaccagu

SEQ ID NO: 278 - RNA, 19 nt, Artificial Sequence
  source: /note="Description of Artificial Sequence: Synthetic oligonucleotide"
gugcaaugagggaccagua

SEQ ID NO: 279 - RNA, 19 nt, Artificial Sequence
  source: /note="Description of Artificial Sequence: Synthetic oligonucleotide"
ugcaaugagggaccaguac

SEQ ID NO: 280 - RNA, 19 nt, Artificial Sequence
  source: /note="Description of Artificial Sequence: Synthetic oligonucleotide"
gcaaugagggaccaguaca

SEQ ID NO: 281 - RNA, 19 nt, Artificial Sequence
  source: /note="Description of Artificial Sequence: Synthetic oligonucleotide"
caaugagggaccaguacau

SEQ ID NO: 282 - RNA, 19 nt, Artificial Sequence
  source: /note="Description of Artificial Sequence: Synthetic oligonucleotide"
aaugagggaccaguacaug

SEQ ID NO: 283 - RNA, 19 nt, Artificial Sequence
  source: /note="Description of Artificial Sequence: Synthetic oligonucleotide"
augagggaccaguacauga

SEQ ID NO: 284 - RNA, 19 nt, Artificial Sequence
  source: /note="Description of Artificial Sequence: Synthetic oligonucleotide"
ugagggaccaguacaugag

SEQ ID NO: 285 - RNA, 19 nt, Artificial Sequence
  source: /note="Description of Artificial Sequence: Synthetic oligonucleotide"
gagggaccaguacaugagg

SEQ ID NO: 286 - RNA, 19 nt, Artificial Sequence
  source: /note="Description of Artificial Sequence: Synthetic oligonucleotide"
agggaccaguacaugagga

SEQ ID NO: 287 - RNA, 19 nt, Artificial Sequence
  source: /note="Description of Artificial Sequence: Synthetic oligonucleotide"
gggaccaguacaugaggac

SEQ ID NO: 288 - RNA, 19 nt, Artificial Sequence
  source: /note="Description of Artificial Sequence: Synthetic oligonucleotide"
ggaccaguacaugaggacu

SEQ ID NO: 289 - RNA, 19 nt, Artificial Sequence
  source: /note="Description of Artificial Sequence: Synthetic oligonucleotide"
gaccaguacaugaggacug

SEQ ID NO: 290 - RNA, 19 nt, Artificial Sequence
  source: /note="Description of Artificial Sequence: Synthetic oligonucleotide"
accaguacaugaggacugg

SEQ ID NO: 291 - RNA, 19 nt, Artificial Sequence
  source: /note="Description of Artificial Sequence: Synthetic oligonucleotide"
ccaguacaugaggacuggg

SEQ ID NO: 292 - RNA, 19 nt, Artificial Sequence
  source: /note="Description of Artificial Sequence: Synthetic oligonucleotide"
caguacaugaggacugggg

SEQ ID NO: 293 - RNA, 19 nt, Artificial Sequence
  source: /note="Description of Artificial Sequence: Synthetic oligonucleotide"
aguacaugaggacugggga

SEQ ID NO: 294 - RNA, 19 nt, Artificial Sequence
  source: /note="Description of Artificial Sequence: Synthetic oligonucleotide"
guacaugaggacuggggag

SEQ ID NO: 295 - RNA, 19 nt, Artificial Sequence
  source: /note="Description of Artificial Sequence: Synthetic oligonucleotide"
uacaugaggacuggggagg

SEQ ID NO: 296 - RNA, 19 nt, Artificial Sequence
  source: /note="Description of Artificial Sequence: Synthetic oligonucleotide"
acaugaggacuggggaggg

SEQ ID NO: 297 - RNA, 19 nt, Artificial Sequence
  source: /note="Description of Artificial Sequence: Synthetic oligonucleotide"
caugaggacuggggagggc

SEQ ID NO: 298 - RNA, 19 nt, Artificial Sequence
  source: /note="Description of Artificial Sequence: Synthetic oligonucleotide"
augaggacuggggagggcu

SEQ ID NO: 299 - RNA, 19 nt, Artificial Sequence
  source: /note="Description of Artificial Sequence: Synthetic oligonucleotide"
ugaggacuggggagggcuu

SEQ ID NO: 300 - RNA, 19 nt, Artificial Sequence
  source: /note="Description of Artificial Sequence: Synthetic oligonucleotide"
gaggacuggggagggcuuu

SEQ ID NO: 301 - RNA, 19 nt, Artificial Sequence
  source: /note="Description of Artificial Sequence: Synthetic oligonucleotide"
aggacuggggagggcuuuc

SEQ ID NO: 302 - RNA, 19 nt, Artificial Sequence
  source: /note="Description of Artificial Sequence: Synthetic oligonucleotide"
ggacuggggagggcuuucu

SEQ ID NO: 303 - RNA, 19 nt, Artificial Sequence
  source: /note="Description of Artificial Sequence: Synthetic oligonucleotide"
gacuggggagggcuuucuu

SEQ ID NO: 304 - RNA, 19 nt, Artificial Sequence
  source: /note="Description of Artificial Sequence: Synthetic oligonucleotide"
acuggggagggcuuucuuu

SEQ ID NO: 305 - RNA, 19 nt, Artificial Sequence
  source: /note="Description of Artificial Sequence: Synthetic oligonucleotide"
cuggggagggcuuucuuug

SEQ ID NO: 306 - RNA, 19 nt, Artificial Sequence
  source: /note="Description of Artificial Sequence: Synthetic oligonucleotide"
uggggagggcuuucuuugu

SEQ ID NO: 307 - RNA, 19 nt, Artificial Sequence
  source: /note="Description of Artificial Sequence: Synthetic oligonucleotide"
uugccauaaauaauacuaa

SEQ ID NO: 308 - RNA, 19 nt, Artificial Sequence
  source: /note="Description of Artificial Sequence: Synthetic oligonucleotide"
ugccauaaauaauacuaaa

SEQ ID NO: 309 - RNA, 19 nt, Artificial Sequence
  source: /note="Description of Artificial Sequence: Synthetic oligonucleotide"
gccauaaauaauacuaaau

SEQ ID NO: 310 - RNA, 19 nt, Artificial Sequence
  source: /note="Description of Artificial Sequence: Synthetic oligonucleotide"
ccauaaauaauacuaaauc

SEQ ID NO: 311 - RNA, 19 nt, Artificial Sequence
  source: /note="Description of Artificial Sequence: Synthetic oligonucleotide"
cauaaauaauacuaaauca

SEQ ID NO: 312 - RNA, 19 nt, Artificial Sequence
  source: /note="Description of Artificial Sequence: Synthetic oligonucleotide"
auaaauaauacuaaaucau

SEQ ID NO: 313 - RNA, 19 nt, Artificial Sequence
  source: /note="Description of Artificial Sequence: Synthetic oligonucleotide"
uaaauaauacuaaaucauu

SEQ ID NO: 314 - RNA, 19 nt, Artificial Sequence
  source: /note="Description of Artificial Sequence: Synthetic oligonucleotide"
aaauaauacuaaaucauuu

SEQ ID NO: 315 - RNA, 19 nt, Artificial Sequence
  source: /note="Description of Artificial Sequence: Synthetic oligonucleotide"
aauaauacuaaaucauuug

SEQ ID NO: 316 - RNA, 19 nt, Artificial Sequence
  source: /note="Description of Artificial Sequence: Synthetic oligonucleotide"
auaauacuaaaucauuuga

SEQ ID NO: 317 - RNA, 19 nt, Artificial Sequence
  source: /note="Description of Artificial Sequence: Synthetic oligonucleotide"
uaauacuaaaucauuugaa

SEQ ID NO: 318 - RNA, 19 nt, Artificial Sequence
  source: /note="Description of Artificial Sequence: Synthetic oligonucleotide"
aauacuaaaucauuugaag

SEQ ID NO: 319 - RNA, 19 nt, Artificial Sequence
  source: /note="Description of Artificial Sequence: Synthetic oligonucleotide"
auacuaaaucauuugaaga

SEQ ID NO: 320 - RNA, 19 nt, Artificial Sequence
  source: /note="Description of Artificial Sequence: Synthetic oligonucleotide"
uacuaaaucauuugaagau

SEQ ID NO: 321 - RNA, 19 nt, Artificial Sequence
  source: /note="Description of Artificial Sequence: Synthetic oligonucleotide"
acuaaaucauuugaagaua

SEQ ID NO: 322 - RNA, 19 nt, Artificial Sequence
  source: /note="Description of Artificial Sequence: Synthetic oligonucleotide"
cuaaaucauuugaagauau

SEQ ID NO: 323 - RNA, 19 nt, Artificial Sequence
  source: /note="Description of Artificial Sequence: Synthetic oligonucleotide"
uaaaucauuugaagauauu

SEQ ID NO: 324 - RNA, 19 nt, Artificial Sequence
  source: /note="Description of Artificial Sequence: Synthetic oligonucleotide"
aaaucauuugaagauauuc

SEQ ID NO: 325 - RNA, 19 nt, Artificial Sequence
  source: /note="Description of Artificial Sequence: Synthetic oligonucleotide"
aaucauuugaagauauuca

SEQ ID NO: 326 - RNA, 19 nt, Artificial Sequence
  source: /note="Description of Artificial Sequence: Synthetic oligonucleotide"
ucauuugaagauauucacc

SEQ ID NO: 327 - RNA, 19 nt, Artificial Sequence
  source: /note="Description of Artificial Sequence: Synthetic oligonucleotide"
cauuugaagauauucacca

SEQ ID NO: 328 - RNA, 19 nt, Artificial Sequence
  source: /note="Description of Artificial Sequence: Synthetic oligonucleotide"
auuugaagauauucaccau

SEQ ID NO: 329 - RNA, 19 nt, Artificial Sequence
  source: /note="Description of Artificial Sequence: Synthetic oligonucleotide"
uuugaagauauucaccauu

SEQ ID NO: 330 - RNA, 19 nt, Artificial Sequence
  source: /note="Description of Artificial Sequence: Synthetic oligonucleotide"
uugaagauauucaccauua

SEQ ID NO: 331 - RNA, 19 nt, Artificial Sequence
  source: /note="Description of Artificial Sequence: Synthetic oligonucleotide"
gagaacaaauuaaaagagu

SEQ ID NO: 332 - RNA, 19 nt, Artificial Sequence
  source: /note="Description of Artificial Sequence: Synthetic oligonucleotide"
agaacaaauuaaaagaguu

SEQ ID NO: 333 - RNA, 19 nt, Artificial Sequence
  source: /note="Description of Artificial Sequence: Synthetic oligonucleotide"
gaacaaauuaaaagaguua

SEQ ID NO: 334 - RNA, 19 nt, Artificial Sequence
  source: /note="Description of Artificial Sequence: Synthetic oligonucleotide"
aacaaauuaaaagaguuaa

SEQ ID NO: 335 - RNA, 19 nt, Artificial Sequence
  source: /note="Description of Artificial Sequence: Synthetic oligonucleotide"
acaaauuaaaagaguuaag

SEQ ID NO: 336 - RNA, 19 nt, Artificial Sequence
  source: /note="Description of Artificial Sequence: Synthetic oligonucleotide"
caaauuaaaagaguuaagg

SEQ ID NO: 337 - RNA, 19 nt, Artificial Sequence
  source: /note="Description of Artificial Sequence: Synthetic oligonucleotide"
aaauuaaaagaguuaagga

SEQ ID NO: 338 - RNA, 19 nt, Artificial Sequence
  source: /note="Description of Artificial Sequence: Synthetic oligonucleotide"
aauuaaaagaguuaaggac

SEQ ID NO: 339 - RNA, 19 nt, Artificial Sequence
  source: /note="Description of Artificial Sequence: Synthetic oligonucleotide"
auuaaaagaguuaaggacu

SEQ ID NO: 340 - RNA, 19 nt, Artificial Sequence
  source: /note="Description of Artificial Sequence: Synthetic oligonucleotide"
uuaaaagaguuaaggacuc

SEQ ID NO: 341 - RNA, 19 nt, Artificial Sequence
  source: /note="Description of Artificial Sequence: Synthetic oligonucleotide"
uaaaagaguuaaggacucu

SEQ ID NO: 342 - RNA, 19 nt, Artificial Sequence
  source: /note="Description of Artificial Sequence: Synthetic oligonucleotide"
aaaagaguuaaggacucug

SEQ ID NO: 343 - RNA, 19 nt, Artificial Sequence
  source: /note="Description of Artificial Sequence: Synthetic oligonucleotide"
aaagaguuaaggacucuga

SEQ ID NO: 344 - RNA, 19 nt, Artificial Sequence
  source: /note="Description of Artificial Sequence: Synthetic oligonucleotide"
aagaguuaaggacucugaa

SEQ ID NO: 345 - RNA, 19 nt, Artificial Sequence
  source: /note="Description of Artificial Sequence: Synthetic oligonucleotide"
gaguuaaggacucugaaga

SEQ ID NO: 346 - RNA, 19 nt, Artificial Sequence
  source: /note="Description of Artificial Sequence: Synthetic oligonucleotide"
aguuaaggacucugaagau

SEQ ID NO: 347 - RNA, 19 nt, Artificial Sequence
  source: /note="Description of Artificial Sequence: Synthetic oligonucleotide"
guuaaggacucugaagaug

SEQ ID NO: 348 - RNA, 19 nt, Artificial Sequence
  source: /note="Description of Artificial Sequence: Synthetic oligonucleotide"
uuaaggacucugaagaugu

SEQ ID NO: 349 - RNA, 19 nt, Artificial Sequence
  source: /note="Description of Artificial Sequence: Synthetic oligonucleotide"
aaggacucugaagauguac

SEQ ID NO: 350 - RNA, 19 nt, Artificial Sequence
  source: /note="Description of Artificial Sequence: Synthetic oligonucleotide"
aggacucugaagauguacc

SEQ ID NO: 351 - RNA, 19 nt, Artificial Sequence
  source: /note="Description of Artificial Sequence: Synthetic oligonucleotide"
ggacucugaagauguaccu

SEQ ID NO: 352 - RNA, 19 nt, Artificial Sequence
  source: /note="Description of Artificial Sequence: Synthetic oligonucleotide"
gacucugaagauguaccua

SEQ ID NO: 353 - RNA, 19 nt, Artificial Sequence
  source: /note="Description of Artificial Sequence: Synthetic oligonucleotide"
acucugaagauguaccuau

SEQ ID NO: 354 - RNA, 19 nt, Artificial Sequence
  source: /note="Description of Artificial Sequence: Synthetic oligonucleotide"
cucugaagauguaccuaug

SEQ ID NO: 355 - RNA, 19 nt, Artificial Sequence
  source: /note="Description of Artificial Sequence: Synthetic oligonucleotide"
ucugaagauguaccuaugg

SEQ ID NO: 356 - RNA, 19 nt, Artificial Sequence
  source: /note="Description of Artificial Sequence: Synthetic oligonucleotide"
cugaagauguaccuauggu

SEQ ID NO: 357 - RNA, 19 nt, Artificial Sequence
  source: /note="Description of Artificial Sequence: Synthetic oligonucleotide"
ugaagauguaccuaugguc

SEQ ID NO: 358 - RNA, 19 nt, Artificial Sequence
  source: /note="Description of Artificial Sequence: Synthetic oligonucleotide"
guaggaaauaaaugugauu

SEQ ID NO: 359 - RNA, 19 nt, Artificial Sequence
  source: /note="Description of Artificial Sequence: Synthetic oligonucleotide"
uaggaaauaaaugugauuu

SEQ ID NO: 360 - RNA, 19 nt, Artificial Sequence
  source: /note="Description of Artificial Sequence: Synthetic oligonucleotide"
aggaaauaaaugugauuug

SEQ ID NO: 361 - RNA, 19 nt, Artificial Sequence
  source: /note="Description of Artificial Sequence: Synthetic oligonucleotide"
ggaaauaaaugugauuugc

SEQ ID NO: 362 - RNA, 19 nt, Artificial Sequence
  source: /note="Description of Artificial Sequence: Synthetic oligonucleotide"
gaaauaaaugugauuugcc

SEQ ID NO: 363 - RNA, 19 nt, Artificial Sequence
  source: /note="Description of Artificial Sequence: Synthetic oligonucleotide"
aaauaaaugugauuugccu

SEQ ID NO: 364 - RNA, 19 nt, Artificial Sequence
  source: /note="Description of Artificial Sequence: Synthetic oligonucleotide"
aauaaaugugauuugccuu

SEQ ID NO: 365 - RNA, 19 nt, Artificial Sequence
  source: /note="Description of Artificial Sequence: Synthetic oligonucleotide"
auaaaugugauuugccuuc

SEQ ID NO: 366 - RNA, 19 nt, Artificial Sequence
  source: /note="Description of Artificial Sequence: Synthetic oligonucleotide"
uaaaugugauuugccuucu

SEQ ID NO: 367 - RNA, 19 nt, Artificial Sequence
  source: /note="Description of Artificial Sequence: Synthetic oligonucleotide"
aaaugugauuugccuucua

SEQ ID NO: 368 - RNA, 19 nt, Artificial Sequence
  source: /note="Description of Artificial Sequence: Synthetic oligonucleotide"
aaugugauuugccuucuag

SEQ ID NO: 369 - RNA, 19 nt, Artificial Sequence
  source: /note="Description of Artificial Sequence: Synthetic oligonucleotide"
augugauuugccuucuaga

SEQ ID NO: 370 - RNA, 19 nt, Artificial Sequence
  source: /note="Description of Artificial Sequence: Synthetic oligonucleotide"
ugugauuugccuucuagaa

SEQ ID NO: 371 - RNA, 19 nt, Artificial Sequence
  source: /note="Description of Artificial Sequence: Synthetic oligonucleotide"
gugauuugccuucuagaac

SEQ ID NO: 372 - RNA, 19 nt, Artificial Sequence
  source: /note="Description of Artificial Sequence: Synthetic oligonucleotide"
ugauuugccuucuagaaca

SEQ ID NO: 373 - RNA, 19 nt, Artificial Sequence
  source: /note="Description of Artificial Sequence: Synthetic oligonucleotide"
gauuugccuucuagaacag

SEQ ID NO: 374 - RNA, 19 nt, Artificial Sequence
  source: /note="Description of Artificial Sequence: Synthetic oligonucleotide"
auuugccuucuagaacagu

SEQ ID NO: 375 - RNA, 19 nt, Artificial Sequence
  source: /note="Description of Artificial Sequence: Synthetic oligonucleotide"
uuugccuucuagaacagua

SEQ ID NO: 376 - RNA, 19 nt, Artificial Sequence
  source: /note="Description of Artificial Sequence: Synthetic oligonucleotide"
ugccuucuagaacaguaga

SEQ ID NO: 377 - RNA, 19 nt, Artificial Sequence
  source: /note="Description of Artificial Sequence: Synthetic oligonucleotide"
gccuucuagaacaguagac

SEQ ID NO: 378 - RNA, 19 nt, Artificial Sequence
  source: /note="Description of Artificial Sequence: Synthetic oligonucleotide"
ccuucuagaacaguagaca

SEQ ID NO: 379 - RNA, 19 nt, Artificial Sequence
  source: /note="Description of Artificial Sequence: Synthetic oligonucleotide"
cuucuagaacaguagacac

SEQ ID NO: 380 - RNA, 19 nt, Artificial Sequence
  source: /note="Description of Artificial Sequence: Synthetic oligonucleotide"
uucuagaacaguagacaca

SEQ ID NO: 381 - RNA, 19 nt, Artificial Sequence
  source: /note="Description of Artificial Sequence: Synthetic oligonucleotide"
ucuagaacaguagacacaa

SEQ ID NO: 382 - RNA, 19 nt, Artificial Sequence
  source: /note="Description of Artificial Sequence: Synthetic oligonucleotide"
cuagaacaguagacacaaa

SEQ ID NO: 383 - RNA, 19 nt, Artificial Sequence
  source: /note="Description of Artificial Sequence: Synthetic oligonucleotide"
uagaacaguagacacaaaa

SEQ ID NO: 384 - RNA, 19 nt, Artificial Sequence
  source: /note="Description of Artificial Sequence: Synthetic oligonucleotide"
agaacaguagacacaaaac

SEQ ID NO: 385 - RNA, 19 nt, Artificial Sequence
  source: /note="Description of Artificial Sequence: Synthetic oligonucleotide"
gaacaguagacacaaaaca

SEQ ID NO: 386 - RNA, 19 nt, Artificial Sequence
  source: /note="Description of Artificial Sequence: Synthetic oligonucleotide"
aacaguagacacaaaacag

SEQ ID NO: 387 - RNA, 19 nt, Artificial Sequence
  source: /note="Description of Artificial Sequence: Synthetic oligonucleotide"
acaguagacacaaaacagg

SEQ ID NO: 388 - RNA, 19 nt, Artificial Sequence
  source: /note="Description of Artificial Sequence: Synthetic oligonucleotide"
caguagacacaaaacaggc

SEQ ID NO: 389 - RNA, 19 nt, Artificial Sequence
  source: /note="Description of Artificial Sequence: Synthetic oligonucleotide"
aguagacacaaaacaggcu

SEQ ID NO: 390 - RNA, 19 nt, Artificial Sequence
  source: /note="Description of Artificial Sequence: Synthetic oligonucleotide"
guagacacaaaacaggcuc

SEQ ID NO: 391 - RNA, 19 nt, Artificial Sequence
  source: /note="Description of Artificial Sequence: Synthetic oligonucleotide"
uagacacaaaacaggcuca

SEQ ID NO: 392 - RNA, 19 nt, Artificial Sequence
  source: /note="Description of Artificial Sequence: Synthetic oligonucleotide"
agacacaaaacaggcucag

SEQ ID NO: 393 - RNA, 19 nt, Artificial Sequence
  source: /note="Description of Artificial Sequence: Synthetic oligonucleotide"
gacacaaaacaggcucagg

SEQ ID NO: 394 - RNA, 19 nt, Artificial Sequence
  source: /note="Description of Artificial Sequence: Synthetic oligonucleotide"
acacaaaacaggcucagga

SEQ ID NO: 395 - RNA, 19 nt, Artificial Sequence
  source: /note="Description of Artificial Sequence: Synthetic oligonucleotide"
cacaaaacaggcucaggac

SEQ ID NO: 396 - RNA, 19 nt, Artificial Sequence
  source: /note="Description of Artificial Sequence: Synthetic oligonucleotide"
acaaaacaggcucaggacu

SEQ ID NO: 397 - RNA, 19 nt, Artificial Sequence
  source: /note="Description of Artificial Sequence: Synthetic oligonucleotide"
caaaacaggcucaggacuu

SEQ ID NO: 398 - RNA, 19 nt, Artificial Sequence
  source: /note="Description of Artificial Sequence: Synthetic oligonucleotide"
aaaacaggcucaggacuua

SEQ ID NO: 399 - RNA, 19 nt, Artificial Sequence
  source: /note="Description of Artificial Sequence: Synthetic oligonucleotide"
aaacaggcucaggacuuag

SEQ ID NO: 400 - RNA, 19 nt, Artificial Sequence
  source: /note="Description of Artificial Sequence: Synthetic oligonucleotide"
aacaggcucaggacuuagc

SEQ ID NO: 401 - RNA, 19 nt, Artificial Sequence
  source: /note="Description of Artificial Sequence: Synthetic oligonucleotide"
acaggcucaggacuuagca

SEQ ID NO: 402 - RNA, 19 nt, Artificial Sequence
  source: /note="Description of Artificial Sequence: Synthetic oligonucleotide"
caggcucaggacuuagcaa

SEQ ID NO: 403 - RNA, 19 nt, Artificial Sequence
  source: /note="Description of Artificial Sequence: Synthetic oligonucleotide"
aggcucaggacuuagcaag

SEQ ID NO: 404 - RNA, 19 nt, Artificial Sequence
  source: /note="Description of Artificial Sequence: Synthetic oligonucleotide"
ggcucaggacuuagcaaga

SEQ ID NO: 405 - RNA, 19 nt, Artificial Sequence
  source: /note="Description of Artificial Sequence: Synthetic oligonucleotide"
gcucaggacuuagcaagaa

SEQ ID NO: 406 - RNA, 19 nt, Artificial Sequence
  source: /note="Description of Artificial Sequence: Synthetic oligonucleotide"
cucaggacuuagcaagaag

SEQ ID NO: 407 - RNA, 19 nt, Artificial Sequence
  source: /note="Description of Artificial Sequence: Synthetic oligonucleotide"
ucaggacuuagcaagaagu

SEQ ID NO: 408 - RNA, 19 nt, Artificial Sequence
  source: /note="Description of Artificial Sequence: Synthetic oligonucleotide"
caggacuuagcaagaaguu

SEQ ID NO: 409 - RNA, 19 nt, Artificial Sequence
  source: /note="Description of Artificial Sequence: Synthetic oligonucleotide"
aggacuuagcaagaaguua

SEQ ID NO: 410 - RNA, 19 nt, Artificial Sequence
  source: /note="Description of Artificial Sequence: Synthetic oligonucleotide"
ggacuuagcaagaaguuau

SEQ ID NO: 411 - RNA, 19 nt, Artificial Sequence
  source: /note="Description of Artificial Sequence: Synthetic oligonucleotide"
gacuuagcaagaaguuaug

SEQ ID NO: 412 - RNA, 19 nt, Artificial Sequence
  source: /note="Description of Artificial Sequence: Synthetic oligonucleotide"
acuuagcaagaaguuaugg

SEQ ID NO: 413 - RNA, 19 nt, Artificial Sequence
  source: /note="Description of Artificial Sequence: Synthetic oligonucleotide"
cuuagcaagaaguuaugga

SEQ ID NO: 414 - RNA, 19 nt, Artificial Sequence
  source: /note="Description of Artificial Sequence: Synthetic oligonucleotide"
uuagcaagaaguuauggaa

SEQ ID NO: 415 - RNA, 19 nt, Artificial Sequence
  source: /note="Description of Artificial Sequence: Synthetic oligonucleotide"
uagcaagaaguuauggaau

SEQ ID NO: 416 - RNA, 19 nt, Artificial Sequence
  source: /note="Description of Artificial Sequence: Synthetic oligonucleotide"
agcaagaaguuauggaauu

SEQ ID NO: 417 - RNA, 19 nt, Artificial Sequence
  source: /note="Description of Artificial Sequence: Synthetic oligonucleotide"
gcaagaaguuauggaauuc

SEQ ID NO: 418 - RNA, 19 nt, Artificial Sequence
  source: /note="Description of Artificial Sequence: Synthetic oligonucleotide"
caagaaguuauggaauucc

SEQ ID NO: 419 - RNA, 19 nt, Artificial Sequence
  source: /note="Description of Artificial Sequence: Synthetic oligonucleotide"
aagaaguuauggaauuccu

SEQ ID NO: 420 - RNA, 19 nt, Artificial Sequence
  source: /note="Description of Artificial Sequence: Synthetic oligonucleotide"
agaaguuauggaauuccuu

SEQ ID NO: 421 - RNA, 19 nt, Artificial Sequence
  source: /note="Description of Artificial Sequence: Synthetic oligonucleotide"
gaaguuauggaauuccuuu

SEQ ID NO: 422 - RNA, 19 nt, Artificial Sequence
  source: /note="Description of Artificial Sequence: Synthetic oligonucleotide"
aaguuauggaauuccuuuu

SEQ ID NO: 423 - RNA, 19 nt, Artificial Sequence
  source: /note="Description of Artificial Sequence: Synthetic oligonucleotide"
aguuauggaauuccuuuua

SEQ ID NO: 424 - RNA, 19 nt, Artificial Sequence
  source: /note="Description of Artificial Sequence: Synthetic oligonucleotide"
guuauggaauuccuuuuau

SEQ ID NO: 425 - RNA, 19 nt, Artificial Sequence
  source: /note="Description of Artificial Sequence: Synthetic oligonucleotide"
uuauggaauuccuuuuauu

SEQ ID NO: 426 - RNA, 19 nt, Artificial Sequence
  source: /note="Description of Artificial Sequence: Synthetic oligonucleotide"
uauggaauuccuuuuauug

SEQ ID NO: 427 - RNA, 19 nt, Artificial Sequence
  source: /note="Description of Artificial Sequence: Synthetic oligonucleotide"
auggaauuccuuuuauuga

SEQ ID NO: 428 - RNA, 19 nt, Artificial Sequence
  source: /note="Description of Artificial Sequence: Synthetic oligonucleotide"
uguuggaucauauucgucc

SEQ ID NO: 429 - RNA, 19 nt, Artificial Sequence
  source: /note="Description of Artificial Sequence: Synthetic oligonucleotide"
uuguuggaucauauucguc

SEQ ID NO: 430 - RNA, 19 nt, Artificial Sequence
  source: /note="Description of Artificial Sequence: Synthetic oligonucleotide"
auuguuggaucauauucgu

SEQ ID NO: 431 - RNA, 19 nt, Artificial Sequence
  source: /note="Description of Artificial Sequence: Synthetic oligonucleotide"
uauuguuggaucauauucg

SEQ ID NO: 432 - RNA, 19 nt, Artificial Sequence
  source: /note="Description of Artificial Sequence: Synthetic oligonucleotide"
cuauuguuggaucauauuc

SEQ ID NO: 433 - RNA, 19 nt, Artificial Sequence
  source: /note="Description of Artificial Sequence: Synthetic oligonucleotide"
ucuauuguuggaucauauu

SEQ ID NO: 434 - RNA, 19 nt, Artificial Sequence
  source: /note="Description of Artificial Sequence: Synthetic oligonucleotide"
cucuauuguuggaucauau

SEQ ID NO: 435 - RNA, 19 nt, Artificial Sequence
  source: /note="Description of Artificial Sequence: Synthetic oligonucleotide"
ccucuauuguuggaucaua

SEQ ID NO: 436 - RNA, 19 nt, Artificial Sequence
  source: /note="Description of Artificial Sequence: Synthetic oligonucleotide"
uccucuauuguuggaucau

SEQ ID NO: 437 - RNA, 19 nt, Artificial Sequence
  source: /note="Description of Artificial Sequence: Synthetic oligonucleotide"
auccucuauuguuggauca

SEQ ID NO: 438 - RNA, 19 nt, Artificial Sequence
  source: /note="Description of Artificial Sequence: Synthetic oligonucleotide"
aauccucuauuguuggauc

SEQ ID NO: 439 - RNA, 19 nt, Artificial Sequence
  source: /note="Description of Artificial Sequence: Synthetic oligonucleotide"
gaauccucuauuguuggau

SEQ ID NO: 440 - RNA, 19 nt, Artificial Sequence
  source: /note="Description of Artificial Sequence: Synthetic oligonucleotide"
ggaauccucuauuguugga

SEQ ID NO: 441 - RNA, 19 nt, Artificial Sequence
  source: /note="Description of Artificial Sequence: Synthetic oligonucleotide"
aggaauccucuauuguugg

SEQ ID NO: 442 - RNA, 19 nt, Artificial Sequence
  source: /note="Description of Artificial Sequence: Synthetic oligonucleotide"
uaggaauccucuauuguug

SEQ ID NO: 443 - RNA, 19 nt, Artificial Sequence
  source: /note="Description of Artificial Sequence: Synthetic oligonucleotide"
guaggaauccucuauuguu

SEQ ID NO: 444 - RNA, 19 nt, Artificial Sequence
  source: /note="Description of Artificial Sequence: Synthetic oligonucleotide"
uguaggaauccucuauugu

SEQ ID NO: 445 - RNA, 19 nt, Artificial Sequence
  source: /note="Description of Artificial Sequence: Synthetic oligonucleotide"
cuguaggaauccucuauug

SEQ ID NO: 446 - RNA, 19 nt, Artificial Sequence
  source: /note="Description of Artificial Sequence: Synthetic oligonucleotide"
ccuguaggaauccucuauu

SEQ ID NO: 447 - RNA, 19 nt, Artificial Sequence
  source: /note="Description of Artificial Sequence: Synthetic oligonucleotide"
uccuguaggaauccucuau

SEQ ID NO: 448 - RNA, 19 nt, Artificial Sequence
  source: /note="Description of Artificial Sequence: Synthetic oligonucleotide"
uuccuguaggaauccucua

SEQ ID NO: 449 - RNA, 19 nt, Artificial Sequence
  source: /note="Description of Artificial Sequence: Synthetic oligonucleotide"
cuuccuguaggaauccucu

SEQ ID NO: 450 - RNA, 19 nt, Artificial Sequence
  source: /note="Description of Artificial Sequence: Synthetic oligonucleotide"
gcuuccuguaggaauccuc

SEQ ID NO: 451 - RNA, 19 nt, Artificial Sequence
  source: /note="Description of Artificial Sequence: Synthetic oligonucleotide"
ugcuuccuguaggaauccu

SEQ ID NO: 452 - RNA, 19 nt, Artificial Sequence
  source: /note="Description of Artificial Sequence: Synthetic oligonucleotide"
uugcuuccuguaggaaucc

SEQ ID NO: 453 - RNA, 19 nt, Artificial Sequence
  source: /note="Description of Artificial Sequence: Synthetic oligonucleotide"
cuugcuuccuguaggaauc

SEQ ID NO: 454 - RNA, 19 nt, Artificial Sequence
  source: /note="Description of Artificial Sequence: Synthetic oligonucleotide"
acuugcuuccuguaggaau

SEQ ID NO: 455 - RNA, 19 nt, Artificial Sequence
  source: /note="Description of Artificial Sequence: Synthetic oligonucleotide"
uacuugcuuccuguaggaa

SEQ ID NO: 456 - RNA, 19 nt, Artificial Sequence
  source: /note="Description of Artificial Sequence: Synthetic oligonucleotide"
cuacuugcuuccuguagga

SEQ ID NO: 457 - RNA, 19 nt, Artificial Sequence
  source: /note="Description of Artificial Sequence: Synthetic oligonucleotide"
acuacuugcuuccuguagg

SEQ ID NO: 458 - RNA, 19 nt, Artificial Sequence
  source: /note="Description of Artificial Sequence: Synthetic oligonucleotide"
uacuacuugcuuccuguag

SEQ ID NO: 459 - RNA, 19 nt, Artificial Sequence
  source: /note="Description of Artificial Sequence: Synthetic oligonucleotide"
uuacuacuugcuuccugua

SEQ ID NO: 460 - RNA, 19 nt, Artificial Sequence
  source: /note="Description of Artificial Sequence: Synthetic oligonucleotide"
auuacuacuugcuuccugu

SEQ ID NO: 461 - RNA, 19 nt, Artificial Sequence
  source: /note="Description of Artificial Sequence: Synthetic oligonucleotide"
aauuacuacuugcuuccug

SEQ ID NO: 462 - RNA, 19 nt, Artificial Sequence
  source: /note="Description of Artificial Sequence: Synthetic oligonucleotide"
cugugucgagaauauccaa

SEQ ID NO: 463 - RNA, 19 nt, Artificial Sequence
  source: /note="Description of Artificial Sequence: Synthetic oligonucleotide"
gcugugucgagaauaucca

SEQ ID NO: 464 - RNA, 19 nt, Artificial Sequence
  source: /note="Description of Artificial Sequence: Synthetic oligonucleotide"
ugcugugucgagaauaucc

SEQ ID NO: 465 - RNA, 19 nt, Artificial Sequence
  source: /note="Description of Artificial Sequence: Synthetic oligonucleotide"
ccugcugugucgagaauau

SEQ ID NO: 466 - RNA, 19 nt, Artificial Sequence
  source: /note="Description of Artificial Sequence: Synthetic oligonucleotide"
gaccugcugugucgagaau

SEQ ID NO: 467 - RNA, 19 nt, Artificial Sequence
  source: /note="Description of Artificial Sequence: Synthetic oligonucleotide"
uugaccugcugugucgaga

SEQ ID NO: 468 - RNA, 19 nt, Artificial Sequence
  source: /note="Description of Artificial Sequence: Synthetic oligonucleotide"
cuugaccugcugugucgag

SEQ ID NO: 469 - RNA, 19 nt, Artificial Sequence
  source: /note="Description of Artificial Sequence: Synthetic oligonucleotide"
ucuugaccugcugugucga

SEQ ID NO: 470 - RNA, 19 nt, Artificial Sequence
  source: /note="Description of Artificial Sequence: Synthetic oligonucleotide"
cucuugaccugcugugucg

SEQ ID NO: 471 - RNA, 19 nt, Artificial Sequence
  source: /note="Description of Artificial Sequence: Synthetic oligonucleotide"
ccucuugaccugcuguguc

SEQ ID NO: 472 - RNA, 19 nt, Artificial Sequence
  source: /note="Description of Artificial Sequence: Synthetic oligonucleotide"
uccucuugaccugcugugu

SEQ ID NO: 473 - RNA, 19 nt, Artificial Sequence
  source: /note="Description of Artificial Sequence: Synthetic oligonucleotide"
cuccucuugaccugcugug

SEQ ID NO: 474 - RNA, 19 nt, Artificial Sequence
  source: /note="Description of Artificial Sequence: Synthetic oligonucleotide"
acuccucuugaccugcugu

SEQ ID NO: 475 - RNA, 19 nt, Artificial Sequence
  source: /note="Description of Artificial Sequence: Synthetic oligonucleotide"
uacuccucuugaccugcug

SEQ ID NO: 476 - RNA, 19 nt, Artificial Sequence
  source: /note="Description of Artificial Sequence: Synthetic oligonucleotide"
guacuccucuugaccugcu

SEQ ID NO: 477 - RNA, 19 nt, Artificial Sequence
  source: /note="Description of Artificial Sequence: Synthetic oligonucleotide"
uguacuccucuugaccugc

SEQ ID NO: 478 - RNA, 19 nt, Artificial Sequence
  source: /note="Description of Artificial Sequence: Synthetic oligonucleotide"
cuguacuccucuugaccug

SEQ ID NO: 479 - RNA, 19 nt, Artificial Sequence
  source: /note="Description of Artificial Sequence: Synthetic oligonucleotide"
acuguacuccucuugaccu

SEQ ID NO: 480 - RNA, 19 nt, Artificial Sequence
  source: /note="Description of Artificial Sequence: Synthetic oligonucleotide"
cacuguacuccucuugacc

SEQ ID NO: 481 - RNA, 19 nt, Artificial Sequence
  source: /note="Description of Artificial Sequence: Synthetic oligonucleotide"
gcacuguacuccucuugac

SEQ ID NO: 482 - RNA, 19 nt, Artificial Sequence
  source: /note="Description of Artificial Sequence: Synthetic oligonucleotide"
ugcacuguacuccucuuga

SEQ ID NO: 483 - RNA, 19 nt, Artificial Sequence
  source: /note="Description of Artificial Sequence: Synthetic oligonucleotide"
uugcacuguacuccucuug

SEQ ID NO: 484 - RNA, 19 nt, Artificial Sequence
  source: /note="Description of Artificial Sequence: Synthetic oligonucleotide"
auugcacuguacuccucuu

SEQ ID NO: 485 - RNA, 19 nt, Artificial Sequence
  source: /note="Description of Artificial Sequence: Synthetic oligonucleotide"
cauugcacuguacuccucu

SEQ ID NO: 486 - RNA, 19 nt, Artificial Sequence
  source: /note="Description of Artificial Sequence: Synthetic oligonucleotide"
ucauugcacuguacuccuc

SEQ ID NO: 487 - RNA, 19 nt, Artificial Sequence
  source: /note="Description of Artificial Sequence: Synthetic oligonucleotide"
cucauugcacuguacuccu

SEQ ID NO: 488 - RNA, 19 nt, Artificial Sequence
  source: /note="Description of Artificial Sequence: Synthetic oligonucleotide"
ccucauugcacuguacucc

SEQ ID NO: 489 - RNA, 19 nt, Artificial Sequence
  source: /note="Description of Artificial Sequence: Synthetic oligonucleotide"
cccucauugcacuguacuc

SEQ ID NO: 490 - RNA, 19 nt, Artificial Sequence
  source: /note="Description of Artificial Sequence: Synthetic oligonucleotide"
cacaaagaaagcccucccc

SEQ ID NO: 491 - RNA, 19 nt, Artificial Sequence
  source: /note="Description of Artificial Sequence: Synthetic oligonucleotide"
acacaaagaaagcccuccc

SEQ ID NO: 492 - RNA, 19 nt, Artificial Sequence
  source: /note="Description of Artificial Sequence: Synthetic oligonucleotide"
uacacaaagaaagcccucc

SEQ ID NO: 493 - RNA, 19 nt, Artificial Sequence
  source: /note="Description of Artificial Sequence: Synthetic oligonucleotide"
auacacaaagaaagcccuc

SEQ ID NO: 494 - RNA, 19 nt, Artificial Sequence
  source: /note="Description of Artificial Sequence: Synthetic oligonucleotide"
aauacacaaagaaagcccu

SEQ ID NO: 495 - RNA, 19 nt, Artificial Sequence
  source: /note="Description of Artificial Sequence: Synthetic oligonucleotide"
aaauacacaaagaaagccc

SEQ ID NO: 496 - RNA, 19 nt, Artificial Sequence
  source: /note="Description of Artificial Sequence: Synthetic oligonucleotide"
caaauacacaaagaaagcc

SEQ ID NO: 497 - RNA, 19 nt, Artificial Sequence
  source: /note="Description of Artificial Sequence: Synthetic oligonucleotide"
gcaaauacacaaagaaagc

SEQ ID NO: 498 - RNA, 19 nt, Artificial Sequence
  source: /note="Description of Artificial Sequence: Synthetic oligonucleotide"
ggcaaauacacaaagaaag

SEQ ID NO: 499 - RNA, 19 nt, Artificial Sequence
  source: /note="Description of Artificial Sequence: Synthetic oligonucleotide"
uggcaaauacacaaagaaa

SEQ ID NO: 500 - RNA, 19 nt, Artificial Sequence
  source: /note="Description of Artificial Sequence: Synthetic oligonucleotide"
auggcaaauacacaaagaa

SEQ ID NO: 501 - RNA, 19 nt, Artificial Sequence
  source: /note="Description of Artificial Sequence: Synthetic oligonucleotide"
uauggcaaauacacaaaga

SEQ ID NO: 502 - RNA, 19 nt, Artificial Sequence
  source: /note="Description of Artificial Sequence: Synthetic oligonucleotide"
uuauggcaaauacacaaag

SEQ ID NO: 503 - RNA, 19 nt, Artificial Sequence
  source: /note="Description of Artificial Sequence: Synthetic oligonucleotide"
uuuauggcaaauacacaaa

SEQ ID NO: 504 - RNA, 19 nt, Artificial Sequence
  source: /note="Description of Artificial Sequence: Synthetic oligonucleotide"
auuuauggcaaauacacaa

SEQ ID NO: 505 - RNA, 19 nt, Artificial Sequence
  source: /note="Description of Artificial Sequence: Synthetic oligonucleotide"
uauuuauggcaaauacaca

SEQ ID NO: 506 - RNA, 19 nt, Artificial Sequence
  source: /note="Description of Artificial Sequence: Synthetic oligonucleotide"
uuauuuauggcaaauacac

SEQ ID NO: 507 - RNA, 19 nt, Artificial Sequence
  source: /note="Description of Artificial Sequence: Synthetic oligonucleotide"
auuauuuauggcaaauaca

SEQ ID NO: 508 - RNA, 19 nt, Artificial Sequence
  source: /note="Description of Artificial Sequence: Synthetic oligonucleotide"
uauuauuuauggcaaauac

SEQ ID NO: 509 - RNA, 19 nt, Artificial Sequence
  source: /note="Description of Artificial Sequence: Synthetic oligonucleotide"
guauuauuuauggcaaaua

SEQ ID NO: 510 - RNA, 19 nt, Artificial Sequence
  source: /note="Description of Artificial Sequence: Synthetic oligonucleotide"
aguauuauuuauggcaaau

SEQ ID NO: 511 - RNA, 19 nt, Artificial Sequence
  source: /note="Description of Artificial Sequence: Synthetic oligonucleotide"
uaguauuauuuauggcaaa

SEQ ID NO: 512 - RNA, 19 nt, Artificial Sequence
  source: /note="Description of Artificial Sequence: Synthetic oligonucleotide"
auaauggugaauaucuuca

SEQ ID NO: 513 - RNA, 19 nt, Artificial Sequence
  source: /note="Description of Artificial Sequence: Synthetic oligonucleotide"
uauaauggugaauaucuuc

SEQ ID NO: 514 - RNA, 19 nt, Artificial Sequence
  source: /note="Description of Artificial Sequence: Synthetic oligonucleotide"
ucuauaauggugaauaucu

SEQ ID NO: 515 - RNA, 19 nt, Artificial Sequence
  source: /note="Description of Artificial Sequence: Synthetic oligonucleotide"
cuugucuuugcugauguuu

SEQ ID NO: 516 - RNA, 19 nt, Artificial Sequence
  source: /note="Description of Artificial Sequence: Synthetic oligonucleotide"
ucuugucuuugcugauguu

SEQ ID NO: 517 - RNA, 19 nt, Artificial Sequence
  source: /note="Description of Artificial Sequence: Synthetic oligonucleotide"
gucuugucuuugcugaugu

SEQ ID NO: 518 - RNA, 19 nt, Artificial Sequence
  source: /note="Description of Artificial Sequence: Synthetic oligonucleotide"
ugucuugucuuugcugaug

SEQ ID NO: 519 - RNA, 19 nt, Artificial Sequence
  source: /note="Description of Artificial Sequence: Synthetic oligonucleotide"
cugucuugucuuugcugau

SEQ ID NO: 520 - RNA, 19 nt, Artificial Sequence
  source: /note="Description of Artificial Sequence: Synthetic oligonucleotide"
cugcugugucgagaauauc

SEQ ID NO: 521 - RNA, 19 nt, Artificial Sequence
  source: /note="Description of Artificial Sequence: Synthetic oligonucleotide"
uguucucuauaauggugaa

SEQ ID NO: 522 - RNA, 19 nt, Artificial Sequence
  source: /note="Description of Artificial Sequence: Synthetic oligonucleotide"
accugcugugucgagaaua

SEQ ID NO: 523 - RNA, 19 nt, Artificial Sequence
  source: /note="Description of Artificial Sequence: Synthetic oligonucleotide"
ugaccugcugugucgagaa

SEQ ID NO: 524 - RNA, 19 nt, Artificial Sequence
  source: /note="Description of Artificial Sequence: Synthetic oligonucleotide"
cuauaauggugaauaucuu

SEQ ID NO: 525 - RNA, 19 nt, Artificial Sequence
  source: /note="Description of Artificial Sequence: Synthetic oligonucleotide"
cucuauaauggugaauauc

SEQ ID NO: 526 - RNA, 19 nt, Artificial Sequence
  source: /note="Description of Artificial Sequence: Synthetic oligonucleotide"
ucucuauaauggugaauau

SEQ ID NO: 527 - RNA, 19 nt, Artificial Sequence
  source: /note="Description of Artificial Sequence: Synthetic oligonucleotide"
uucucuauaauggugaaua

SEQ ID NO: 528 - RNA, 19 nt, Artificial Sequence
  source: /note="Description of Artificial Sequence: Synthetic oligonucleotide"
guucucuauaauggugaau

SEQ ID NO: 529 - RNA, 19 nt, Artificial Sequence
  source: /note="Description of Artificial Sequence: Synthetic oligonucleotide"
uuguucucuauaaugguga

SEQ ID NO: 530 - RNA, 19 nt, Artificial Sequence
  source: /note="Description of Artificial Sequence: Synthetic oligonucleotide"
uuuguucucuauaauggug

SEQ ID NO: 531 - RNA, 19 nt, Artificial Sequence
  source: /note="Description of Artificial Sequence: Synthetic oligonucleotide"
auuuguucucuauaauggu

SEQ ID NO: 532 - RNA, 19 nt, Artificial Sequence
  source: /note="Description of Artificial Sequence: Synthetic oligonucleotide"
aauuuguucucuauaaugg

SEQ ID NO: 533 - RNA, 19 nt, Artificial Sequence
  source: /note="Description of Artificial Sequence: Synthetic oligonucleotide"
uaauuuguucucuauaaug

SEQ ID NO: 534 - RNA, 19 nt, Artificial Sequence
  source: /note="Description of Artificial Sequence: Synthetic oligonucleotide"
uuaauuuguucucuauaau

SEQ ID NO: 535 - RNA, 19 nt, Artificial Sequence
  source: /note="Description of Artificial Sequence: Synthetic oligonucleotide"
uuuaauuuguucucuauaa

SEQ ID NO: 536 - RNA, 19 nt, Artificial Sequence
  source: /note="Description of Artificial Sequence: Synthetic oligonucleotide"
uuuuaauuuguucucuaua

SEQ ID NO: 537 - RNA, 19 nt, Artificial Sequence
  source: /note="Description of Artificial Sequence: Synthetic oligonucleotide"
cuuuuaauuuguucucuau

SEQ ID NO: 538 - RNA, 19 nt, Artificial Sequence
  source: /note="Description of Artificial Sequence: Synthetic oligonucleotide"
ucuuuuaauuuguucucua

SEQ ID NO: 539 - RNA, 19 nt, Artificial Sequence
  source: /note="Description of Artificial Sequence: Synthetic oligonucleotide"
cucuuuuaauuuguucucu

SEQ ID NO: 540 - RNA, 19 nt, Artificial Sequence
  source: /note="Description of Artificial Sequence: Synthetic oligonucleotide"
ggaccauagguacaucuuc

SEQ ID NO: 541 - RNA, 19 nt, Artificial Sequence
  source: /note="Description of Artificial Sequence: Synthetic oligonucleotide"
aggaccauagguacaucuu

SEQ ID NO: 542 - RNA, 19 nt, Artificial Sequence
  source: /note="Description of Artificial Sequence: Synthetic oligonucleotide"
uaggaccauagguacaucu

SEQ ID NO: 543 - RNA, 19 nt, Artificial Sequence
  source: /note="Description of Artificial Sequence: Synthetic oligonucleotide"
cuaggaccauagguacauc

SEQ ID NO: 544 - RNA, 19 nt, Artificial Sequence
  source: /note="Description of Artificial Sequence: Synthetic oligonucleotide"
acuaggaccauagguacau

SEQ ID NO: 545 - RNA, 19 nt, Artificial Sequence
  source: /note="Description of Artificial Sequence: Synthetic oligonucleotide"
uacuaggaccauagguaca

SEQ ID NO: 546 - RNA, 19 nt, Artificial Sequence
  source: /note="Description of Artificial Sequence: Synthetic oligonucleotide"
cuacuaggaccauagguac

SEQ ID NO: 547 - RNA, 19 nt, Artificial Sequence
  source: /note="Description of Artificial Sequence: Synthetic oligonucleotide"
ccuacuaggaccauaggua

SEQ ID NO: 548 - RNA, 19 nt, Artificial Sequence
  source: /note="Description of Artificial Sequence: Synthetic oligonucleotide"
uccuacuaggaccauaggu

SEQ ID NO: 549 - RNA, 19 nt, Artificial Sequence
  source: /note="Description of Artificial Sequence: Synthetic oligonucleotide"
uuccuacuaggaccauagg

SEQ ID NO: 550 - RNA, 19 nt, Artificial Sequence
  source: /note="Description of Artificial Sequence: Synthetic oligonucleotide"
uuuccuacuaggaccauag

SEQ ID NO: 551 - RNA, 19 nt, Artificial Sequence
  source: /note="Description of Artificial Sequence: Synthetic oligonucleotide"
auuuccuacuaggaccaua

SEQ ID NO: 552 - RNA, 19 nt, Artificial Sequence
  source: /note="Description of Artificial Sequence: Synthetic oligonucleotide"
uauuuccuacuaggaccau

SEQ ID NO: 553 - RNA, 19 nt, Artificial Sequence
  source: /note="Description of Artificial Sequence: Synthetic oligonucleotide"
uuauuuccuacuaggacca

SEQ ID NO: 554 - RNA, 19 nt, Artificial Sequence
  source: /note="Description of Artificial Sequence: Synthetic oligonucleotide"
uuuauuuccuacuaggacc

SEQ ID NO: 555 - RNA, 19 nt, Artificial Sequence
  source: /note="Description of Artificial Sequence: Synthetic oligonucleotide"
auuuauuuccuacuaggac

SEQ ID NO: 556 - RNA, 19 nt, Artificial Sequence
  source: /note="Description of Artificial Sequence: Synthetic oligonucleotide"
cauuuauuuccuacuagga

SEQ ID NO: 557 - RNA, 19 nt, Artificial Sequence
  source: /note="Description of Artificial Sequence: Synthetic oligonucleotide"
acauuuauuuccuacuagg

SEQ ID NO: 558 - RNA, 19 nt, Artificial Sequence
  source: /note="Description of Artificial Sequence: Synthetic oligonucleotide"
cacauuuauuuccuacuag

SEQ ID NO: 559 - RNA, 19 nt, Artificial Sequence
  source: /note="Description of Artificial Sequence: Synthetic oligonucleotide"
ucacauuuauuuccuacua

SEQ ID NO: 560 - RNA, 19 nt, Artificial Sequence
  source: /note="Description of Artificial Sequence: Synthetic oligonucleotide"
aucacauuuauuuccuacu

SEQ ID NO: 561 - RNA, 19 nt, Artificial Sequence
  source: /note="Description of Artificial Sequence: Synthetic oligonucleotide"
uuucaauaaaaggaauucc

SEQ ID NO: 562 - RNA, 19 nt, Artificial Sequence
  source: /note="Description of Artificial Sequence: Synthetic oligonucleotide"
guuucaauaaaaggaauuc

SEQ ID NO: 563 - RNA, 19 nt, Artificial Sequence
  source: /note="Description of Artificial Sequence: Synthetic oligonucleotide"
uguuucaauaaaaggaauu

SEQ ID NO: 564 - RNA, 19 nt, Artificial Sequence
  source: /note="Description of Artificial Sequence: Synthetic oligonucleotide"
auguuucaauaaaaggaau

SEQ ID NO: 565 - RNA, 19 nt, Artificial Sequence
  source: /note="Description of Artificial Sequence: Synthetic oligonucleotide"
gauguuucaauaaaaggaa

SEQ ID NO: 566 - RNA, 19 nt, Artificial Sequence
  source: /note="Description of Artificial Sequence: Synthetic oligonucleotide"
ugauguuucaauaaaagga

SEQ ID NO: 567 - RNA, 19 nt, Artificial Sequence
  source: /note="Description of Artificial Sequence: Synthetic oligonucleotide"
cugauguuucaauaaaagg

SEQ ID NO: 568 - RNA, 19 nt, Artificial Sequence
  source: /note="Description of Artificial Sequence: Synthetic oligonucleotide"
gcugauguuucaauaaaag

SEQ ID NO: 569 - RNA, 19 nt, Artificial Sequence
  source: /note="Description of Artificial Sequence: Synthetic oligonucleotide"
ugcugauguuucaauaaaa

SEQ ID NO: 570 - RNA, 19 nt, Artificial Sequence
  source: /note="Description of Artificial Sequence: Synthetic oligonucleotide"
uugcugauguuucaauaaa

SEQ ID NO: 571 - RNA, 19 nt, Artificial Sequence
  source: /note="Description of Artificial Sequence: Synthetic oligonucleotide"
uuugcugauguuucaauaa

SEQ ID NO: 572 - RNA, 19 nt, Artificial Sequence
  source: /note="Description of Artificial Sequence: Synthetic oligonucleotide"
cuuugcugauguuucaaua

SEQ ID NO: 573 - RNA, 19 nt, Artificial Sequence
  source: /note="Description of Artificial Sequence: Synthetic oligonucleotide"
ucuuugcugauguuucaau

SEQ ID NO: 574 - RNA, 19 nt, Artificial Sequence
  source: /note="Description of Artificial Sequence: Synthetic oligonucleotide"
gucuuugcugauguuucaa

SEQ ID NO: 575 - RNA, 19 nt, Artificial Sequence
  source: /note="Description of Artificial Sequence: Synthetic oligonucleotide"
ugucuuugcugauguuuca

SEQ ID NO: 576 - RNA, 19 nt, Artificial Sequence
  source: /note="Description of Artificial Sequence: Synthetic oligonucleotide"
uugucuuugcugauguuuc

SEQ ID NO: 577 - RNA, 19 nt, Artificial Sequence
  source: /note="Description of Artificial Sequence: Synthetic oligonucleotide"
caaguuuauauucagucau

SEQ ID NO: 578 - RNA, 19 nt, Artificial Sequence
  source: /note="Description of Artificial Sequence: Synthetic oligonucleotide"
acaaguuuauauucaguca

SEQ ID NO: 579 - RNA, 19 nt, Artificial Sequence
  source: /note="Description of Artificial Sequence: Synthetic oligonucleotide"
cacaaguuuauauucaguc

SEQ ID NO: 580 - RNA, 19 nt, Artificial Sequence
  source: /note="Description of Artificial Sequence: Synthetic oligonucleotide"
ccacaaguuuauauucagu

SEQ ID NO: 581 - RNA, 19 nt, Artificial Sequence
  source: /note="Description of Artificial Sequence: Synthetic oligonucleotide"
accacaaguuuauauucag

SEQ ID NO: 582 - RNA, 19 nt, Artificial Sequence
  source: /note="Description of Artificial Sequence: Synthetic oligonucleotide"
uaccacaaguuuauauuca

SEQ ID NO: 583 - RNA, 19 nt, Artificial Sequence
  source: /note="Description of Artificial Sequence: Synthetic oligonucleotide"
cuaccacaaguuuauauuc

SEQ ID NO: 584 - RNA, 19 nt, Artificial Sequence
  source: /note="Description of Artificial Sequence: Synthetic oligonucleotide"
acuaccacaaguuuauauu

SEQ ID NO: 585 - RNA, 19 nt, Artificial Sequence
  source: /note="Description of Artificial Sequence: Synthetic oligonucleotide"
aacuaccacaaguuuauau

SEQ ID NO: 586 - RNA, 19 nt, Artificial Sequence
  source: /note="Description of Artificial Sequence: Synthetic oligonucleotide"
caacuaccacaaguuuaua

SEQ ID NO: 587 - RNA, 19 nt, Artificial Sequence
  source: /note="Description of Artificial Sequence: Synthetic oligonucleotide"
ccaacuaccacaaguuuau

SEQ ID NO: 588 - RNA, 19 nt, Artificial Sequence
  source: /note="Description of Artificial Sequence: Synthetic oligonucleotide"
uccaacuaccacaaguuua

SEQ ID NO: 589 - RNA, 19 nt, Artificial Sequence
  source: /note="Description of Artificial Sequence: Synthetic oligonucleotide"
cuccaacuaccacaaguuu

SEQ ID NO: 590 - RNA, 19 nt, Artificial Sequence
  source: /note="Description of Artificial Sequence: Synthetic oligonucleotide"
gcuccaacuaccacaaguu

SEQ ID NO: 591 - RNA, 19 nt, Artificial Sequence
  source: /note="Description of Artificial Sequence: Synthetic oligonucleotide"
agcuccaacuaccacaagu

SEQ ID NO: 592 - RNA, 19 nt, Artificial Sequence
  source: /note="Description of Artificial Sequence: Synthetic oligonucleotide"
cagcuccaacuaccacaag

SEQ ID NO: 593 - RNA, 19 nt, Artificial Sequence
  source: /note="Description of Artificial Sequence: Synthetic oligonucleotide"
ccagcuccaacuaccacaa

SEQ ID NO: 594 - RNA, 19 nt, Artificial Sequence
  source: /note="Description of Artificial Sequence: Synthetic oligonucleotide"
accagcuccaacuaccaca

SEQ ID NO: 595 - RNA, 19 nt, Artificial Sequence
  source: /note="Description of Artificial Sequence: Synthetic oligonucleotide"
caccagcuccaacuaccac

SEQ ID NO: 596 - RNA, 19 nt, Artificial Sequence
  source: /note="Description of Artificial Sequence: Synthetic oligonucleotide"
ccaccagcuccaacuacca

SEQ ID NO: 597 - RNA, 19 nt, Artificial Sequence
  source: /note="Description of Artificial Sequence: Synthetic oligonucleotide"
gccaccagcuccaacuacc

SEQ ID NO: 598 - RNA, 19 nt, Artificial Sequence
  source: /note="Description of Artificial Sequence: Synthetic oligonucleotide"
cgccaccagcuccaacuac

SEQ ID NO: 599 - RNA, 19 nt, Artificial Sequence
  source: /note="Description of Artificial Sequence: Synthetic oligonucleotide"
acgccaccagcuccaacua

SEQ ID NO: 600 - RNA, 19 nt, Artificial Sequence
  source: /note="Description of Artificial Sequence: Synthetic oligonucleotide"
uacgccaccagcuccaacu

SEQ ID NO: 601 - RNA, 19 nt, Artificial Sequence
  source: /note="Description of Artificial Sequence: Synthetic oligonucleotide"
cuacgccaccagcuccaac

SEQ ID NO: 602 - RNA, 19 nt, Artificial Sequence
  source: /note="Description of Artificial Sequence: Synthetic oligonucleotide"
ccuacgccaccagcuccaa

SEQ ID NO: 603 - RNA, 19 nt, Artificial Sequence
  source: /note="Description of Artificial Sequence: Synthetic oligonucleotide"
gccuacgccaccagcucca

SEQ ID NO: 604 - RNA, 19 nt, Artificial Sequence
  source: /note="Description of Artificial Sequence: Synthetic oligonucleotide"
ugccuacgccaccagcucc

SEQ ID NO: 605 - RNA, 19 nt, Artificial Sequence
  source: /note="Description of Artificial Sequence: Synthetic oligonucleotide"
uugccuacgccaccagcuc

SEQ ID NO: 606 - RNA, 19 nt, Artificial Sequence
  source: /note="Description of Artificial Sequence: Synthetic oligonucleotide"
cuugccuacgccaccagcu

SEQ ID NO: 607 - RNA, 19 nt, Artificial Sequence
  source: /note="Description of Artificial Sequence: Synthetic oligonucleotide"
ucuugccuacgccaccagc

SEQ ID NO: 608 - RNA, 19 nt, Artificial Sequence
  source: /note="Description of Artificial Sequence: Synthetic oligonucleotide"
cucuugccuacgccaccag

SEQ ID NO: 609 - RNA, 19 nt, Artificial Sequence
  source: /note="Description of Artificial Sequence: Synthetic oligonucleotide"
acucuugccuacgccacca

SEQ ID NO: 610 - RNA, 19 nt, Artificial Sequence
  source: /note="Description of Artificial Sequence: Synthetic oligonucleotide"
cacucuugccuacgccacc

SEQ ID NO: 611 - RNA, 19 nt, Artificial Sequence
  source: /note="Description of Artificial Sequence: Synthetic oligonucleotide"
gcacucuugccuacgccac

SEQ ID NO: 612 - RNA, 19 nt, Artificial Sequence
  source: /note="Description of Artificial Sequence: Synthetic oligonucleotide"
ggcacucuugccuacgcca

SEQ ID NO: 613 - RNA, 19 nt, Artificial Sequence
  source: /note="Description of Artificial Sequence: Synthetic oligonucleotide"
aggcacucuugccuacgcc

SEQ ID NO: 614 - RNA, 19 nt, Artificial Sequence
  source: /note="Description of Artificial Sequence: Synthetic oligonucleotide"
aaggcacucuugccuacgc

SEQ ID NO: 615 - RNA, 19 nt, Artificial Sequence
  source: /note="Description of Artificial Sequence: Synthetic oligonucleotide"
caaggcacucuugccuacg

SEQ ID NO: 616 - RNA, 19 nt, Artificial Sequence
  source: /note="Description of Artificial Sequence: Synthetic oligonucleotide"
ucaaggcacucuugccuac

SEQ ID NO: 617 - RNA, 19 nt, Artificial Sequence
  source: /note="Description of Artificial Sequence: Synthetic oligonucleotide"
gucaaggcacucuugccua

SEQ ID NO: 618 - RNA, 19 nt, Artificial Sequence
  source: /note="Description of Artificial Sequence: Synthetic oligonucleotide"
cgucaaggcacucuugccu

SEQ ID NO: 619 - RNA, 19 nt, Artificial Sequence
  source: /note="Description of Artificial Sequence: Synthetic oligonucleotide"
ucgucaaggcacucuugcc

SEQ ID NO: 620 - RNA, 19 nt, Artificial Sequence
  source: /note="Description of Artificial Sequence: Synthetic oligonucleotide"
aucgucaaggcacucuugc

SEQ ID NO: 621 - RNA, 19 nt, Artificial Sequence
  source: /note="Description of Artificial Sequence: Synthetic oligonucleotide"
uaucgucaaggcacucuug

SEQ ID NO: 622 - RNA, 19 nt, Artificial Sequence
  source: /note="Description of Artificial Sequence: Synthetic oligonucleotide"
guaucgucaaggcacucuu

SEQ ID NO: 623 - RNA, 19 nt, Artificial Sequence
  source: /note="Description of Artificial Sequence: Synthetic oligonucleotide"
uguaucgucaaggcacucu

SEQ ID NO: 624 - RNA, 19 nt, Artificial Sequence
  source: /note="Description of Artificial Sequence: Synthetic oligonucleotide"
cuguaucgucaaggcacuc

SEQ ID NO: 625 - RNA, 19 nt, Artificial Sequence
  source: /note="Description of Artificial Sequence: Synthetic oligonucleotide"
gcuguaucgucaaggcacu

SEQ ID NO: 626 - RNA, 19 nt, Artificial Sequence
  source: /note="Description of Artificial Sequence: Synthetic oligonucleotide"
agcuguaucgucaaggcac

SEQ ID NO: 627 - RNA, 19 nt, Artificial Sequence
  source: /note="Description of Artificial Sequence: Synthetic oligonucleotide"
uagcuguaucgucaaggca

SEQ ID NO: 628 - RNA, 19 nt, Artificial Sequence
  source: /note="Description of Artificial Sequence: Synthetic oligonucleotide"
uuagcuguaucgucaaggc

SEQ ID NO: 629 - RNA, 19 nt, Artificial Sequence
  source: /note="Description of Artificial Sequence: Synthetic oligonucleotide"
auuagcuguaucgucaagg

SEQ ID NO: 630 - RNA, 19 nt, Artificial Sequence
  source: /note="Description of Artificial Sequence: Synthetic oligonucleotide"
aauuagcuguaucgucaag

SEQ ID NO: 631 - RNA, 19 nt, Artificial Sequence
  source: /note="Description of Artificial Sequence: Synthetic oligonucleotide"
gaauuagcuguaucgucaa

SEQ ID NO: 632 - RNA, 19 nt, Artificial Sequence
  source: /note="Description of Artificial Sequence: Synthetic oligonucleotide"
ugaauuagcuguaucguca

SEQ ID NO: 633 - RNA, 19 nt, Artificial Sequence
  source: /note="Description of Artificial Sequence: Synthetic oligonucleotide"
cugaauuagcuguaucguc

SEQ ID NO: 634 - RNA, 19 nt, Artificial Sequence
  source: /note="Description of Artificial Sequence: Synthetic oligonucleotide"
ucugaauuagcuguaucgu

SEQ ID NO: 635 - RNA, 19 nt, Artificial Sequence
  source: /note="Description of Artificial Sequence: Synthetic oligonucleotide"
uucugaauuagcuguaucg

SEQ ID NO: 636 - RNA, 19 nt, Artificial Sequence
  source: /note="Description of Artificial Sequence: Synthetic oligonucleotide"
auucugaauuagcuguauc

SEQ ID NO: 637 - RNA, 19 nt, Artificial Sequence
  source: /note="Description of Artificial Sequence: Synthetic oligonucleotide"
gauucugaauuagcuguau

SEQ ID NO: 638 - RNA, 19 nt, Artificial Sequence
  source: /note="Description of Artificial Sequence: Synthetic oligonucleotide"
ugauucugaauuagcugua

SEQ ID NO: 639 - RNA, 19 nt, Artificial Sequence
  source: /note="Description of Artificial Sequence: Synthetic oligonucleotide"
augauucugaauuagcugu

SEQ ID NO: 640 - RNA, 19 nt, Artificial Sequence
  source: /note="Description of Artificial Sequence: Synthetic oligonucleotide"
aaugauucugaauuagcug

SEQ ID NO: 641 - RNA, 19 nt, Artificial Sequence
  source: /note="Description of Artificial Sequence: Synthetic oligonucleotide"
aaaugauucugaauuagcu

SEQ ID NO: 642 - RNA, 19 nt, Artificial Sequence
  source: /note="Description of Artificial Sequence: Synthetic oligonucleotide"
aaaaugauucugaauuagc

SEQ ID NO: 643 - RNA, 19 nt, Artificial Sequence
  source: /note="Description of Artificial Sequence: Synthetic oligonucleotide"
caaaaugauucugaauuag

SEQ ID NO: 644 - RNA, 19 nt, Artificial Sequence
  source: /note="Description of Artificial Sequence: Synthetic oligonucleotide"
acaaaaugauucugaauua

SEQ ID NO: 645 - RNA, 19 nt, Artificial Sequence
  source: /note="Description of Artificial Sequence: Synthetic oligonucleotide"
cacaaaaugauucugaauu

SEQ ID NO: 646 - RNA, 19 nt, Artificial Sequence
  source: /note="Description of Artificial Sequence: Synthetic oligonucleotide"
ccacaaaaugauucugaau

SEQ ID NO: 647 - RNA, 19 nt, Artificial Sequence
  source: /note="Description of Artificial Sequence: Synthetic oligonucleotide"
uccacaaaaugauucugaa

SEQ ID NO: 648 - RNA, 19 nt, Artificial Sequence
  source: /note="Description of Artificial Sequence: Synthetic oligonucleotide"
guccacaaaaugauucuga

SEQ ID NO: 649 - RNA, 19 nt, Artificial Sequence
  source: /note="Description of Artificial Sequence: Synthetic oligonucleotide"
cguccacaaaaugauucug

SEQ ID NO: 650 - RNA, 19 nt, Artificial Sequence
  source: /note="Description of Artificial Sequence: Synthetic oligonucleotide"
ucguccacaaaaugauucu

SEQ ID NO: 651 - RNA, 19 nt, Artificial Sequence
  source: /note="Description of Artificial Sequence: Synthetic oligonucleotide"
uucguccacaaaaugauuc

SEQ ID NO: 652 - RNA, 19 nt, Artificial Sequence
  source: /note="Description of Artificial Sequence: Synthetic oligonucleotide"
auucguccacaaaaugauu

SEQ ID NO: 653 - RNA, 19 nt, Artificial Sequence
  source: /note="Description of Artificial Sequence: Synthetic oligonucleotide"
uauucguccacaaaaugau

SEQ ID NO: 654 - RNA, 19 nt, Artificial Sequence
  source: /note="Description of Artificial Sequence: Synthetic oligonucleotide"
auauucguccacaaaauga

SEQ ID NO: 655 - RNA, 19 nt, Artificial Sequence
  source: /note="Description of Artificial Sequence: Synthetic oligonucleotide"
cauauucguccacaaaaug

SEQ ID NO: 656 - RNA, 19 nt, Artificial Sequence
  source: /note="Description of Artificial Sequence: Synthetic oligonucleotide"
ucauauucguccacaaaau

SEQ ID NO: 657 - RNA, 19 nt, Artificial Sequence
  source: /note="Description of Artificial Sequence: Synthetic oligonucleotide"
aucauauucguccacaaaa

SEQ ID NO: 658 - RNA, 19 nt, Artificial Sequence
  source: /note="Description of Artificial Sequence: Synthetic oligonucleotide"
gaucauauucguccacaaa

SEQ ID NO: 659 - RNA, 19 nt, Artificial Sequence
  source: /note="Description of Artificial Sequence: Synthetic oligonucleotide"
ggaucauauucguccacaa

SEQ ID NO: 660 - RNA, 19 nt, Artificial Sequence
  source: /note="Description of Artificial Sequence: Synthetic oligonucleotide"
uggaucauauucguccaca

SEQ ID NO: 661 - RNA, 19 nt, Artificial Sequence
  source: /note="Description of Artificial Sequence: Synthetic oligonucleotide"
uuggaucauauucguccac

SEQ ID NO: 662 - RNA, 19 nt, Artificial Sequence
  source: /note="Description of Artificial Sequence: Synthetic oligonucleotide"
guuggaucauauucgucca

SEQ ID NO: 663 - RNA, 19 nt, Artificial Sequence
  source: /note="Description of Artificial Sequence: Synthetic oligonucleotide"
caauuacuacuugcuuccu

SEQ ID NO: 664 - RNA, 19 nt, Artificial Sequence
  source: /note="Description of Artificial Sequence: Synthetic oligonucleotide"
ucaauuacuacuugcuucc

SEQ ID NO: 665 - RNA, 19 nt, Artificial Sequence
  source: /note="Description of Artificial Sequence: Synthetic oligonucleotide"
aucaauuacuacuugcuuc

SEQ ID NO: 666 - RNA, 19 nt, Artificial Sequence
  source: /note="Description of Artificial Sequence: Synthetic oligonucleotide"
caucaauuacuacuugcuu

SEQ ID NO: 667 - RNA, 19 nt, Artificial Sequence
  source: /note="Description of Artificial Sequence: Synthetic oligonucleotide"
ccaucaauuacuacuugcu

SEQ ID NO: 668 - RNA, 19 nt, Artificial Sequence
  source: /note="Description of Artificial Sequence: Synthetic oligonucleotide"
uccaucaauuacuacuugc

SEQ ID NO: 669 - RNA, 19 nt, Artificial Sequence
  source: /note="Description of Artificial Sequence: Synthetic oligonucleotide"
cuccaucaauuacuacuug

SEQ ID NO: 670 - RNA, 19 nt, Artificial Sequence
  source: /note="Description of Artificial Sequence: Synthetic oligonucleotide"
ucuccaucaauuacuacuu

SEQ ID NO: 671 - RNA, 19 nt, Artificial Sequence
  source: /note="Description of Artificial Sequence: Synthetic oligonucleotide"
uucuccaucaauuacuacu

SEQ ID NO: 672 - RNA, 19 nt, Artificial Sequence
  source: /note="Description of Artificial Sequence: Synthetic oligonucleotide"
uuucuccaucaauuacuac

SEQ ID NO: 673 - RNA, 19 nt, Artificial Sequence
  source: /note="Description of Artificial Sequence: Synthetic oligonucleotide"
guuucuccaucaauuacua

SEQ ID NO: 674 - RNA, 19 nt, Artificial Sequence
  source: /note="Description of Artificial Sequence: Synthetic oligonucleotide"
gguuucuccaucaauuacu

SEQ ID NO: 675 - RNA, 19 nt, Artificial Sequence
  source: /note="Description of Artificial Sequence: Synthetic oligonucleotide"
agguuucuccaucaauuac

SEQ ID NO: 676 - RNA, 19 nt, Artificial Sequence
  source: /note="Description of Artificial Sequence: Synthetic oligonucleotide"
cagguuucuccaucaauua

SEQ ID NO: 677 - RNA, 19 nt, Artificial Sequence
  source: /note="Description of Artificial Sequence: Synthetic oligonucleotide"
acagguuucuccaucaauu

SEQ ID NO: 678 - RNA, 19 nt, Artificial Sequence
  source: /note="Description of Artificial Sequence: Synthetic oligonucleotide"
gacagguuucuccaucaau

SEQ ID NO: 679 - RNA, 19 nt, Artificial Sequence
  source: /note="Description of Artificial Sequence: Synthetic oligonucleotide"
agacagguuucuccaucaa

SEQ ID NO: 680 - RNA, 19 nt, Artificial Sequence
  source: /note="Description of Artificial Sequence: Synthetic oligonucleotide"
gagacagguuucuccauca

SEQ ID NO: 681 - RNA, 19 nt, Artificial Sequence
  source: /note="Description of Artificial Sequence: Synthetic oligonucleotide"
agagacagguuucuccauc

SEQ ID NO: 682 - RNA, 19 nt, Artificial Sequence
  source: /note="Description of Artificial Sequence: Synthetic oligonucleotide"
aagagacagguuucuccau

SEQ ID NO: 683 - RNA, 19 nt, Artificial Sequence
  source: /note="Description of Artificial Sequence: Synthetic oligonucleotide"
caagagacagguuucucca

SEQ ID NO: 684 - RNA, 19 nt, Artificial Sequence
  source: /note="Description of Artificial Sequence: Synthetic oligonucleotide"
ccaagagacagguuucucc

SEQ ID NO: 685 - RNA, 19 nt, Artificial Sequence
  source: /note="Description of Artificial Sequence: Synthetic oligonucleotide"
uccaagagacagguuucuc

SEQ ID NO: 686 - RNA, 19 nt, Artificial Sequence
  source: /note="Description of Artificial Sequence: Synthetic oligonucleotide"
auccaagagacagguuucu

SEQ ID NO: 687 - RNA, 19 nt, Artificial Sequence
  source: /note="Description of Artificial Sequence: Synthetic oligonucleotide"
uauccaagagacagguuuc

SEQ ID NO: 688 - RNA, 19 nt, Artificial Sequence
  source: /note="Description of Artificial Sequence: Synthetic oligonucleotide"
auauccaagagacagguuu

SEQ ID NO: 689 - RNA, 19 nt, Artificial Sequence
  source: /note="Description of Artificial Sequence: Synthetic oligonucleotide"
aauauccaagagacagguu

SEQ ID NO: 690 - RNA, 19 nt, Artificial Sequence
  source: /note="Description of Artificial Sequence: Synthetic oligonucleotide"
gaauauccaagagacaggu

SEQ ID NO: 691 - RNA, 19 nt, Artificial Sequence
  source: /note="Description of Artificial Sequence: Synthetic oligonucleotide"
agaauauccaagagacagg

SEQ ID NO: 692 - RNA, 19 nt, Artificial Sequence
  source: /note="Description of Artificial Sequence: Synthetic oligonucleotide"
gagaauauccaagagacag

SEQ ID NO: 693 - RNA, 19 nt, Artificial Sequence
  source: /note="Description of Artificial Sequence: Synthetic oligonucleotide"
cgagaauauccaagagaca

SEQ ID NO: 694 - RNA, 19 nt, Artificial Sequence
  source: /note="Description of Artificial Sequence: Synthetic oligonucleotide"
ucgagaauauccaagagac

SEQ ID NO: 695 - RNA, 19 nt, Artificial Sequence
  source: /note="Description of Artificial Sequence: Synthetic oligonucleotide"
gucgagaauauccaagaga

SEQ ID NO: 696 - RNA, 19 nt, Artificial Sequence
  source: /note="Description of Artificial Sequence: Synthetic oligonucleotide"
ugucgagaauauccaagag

SEQ ID NO: 697 - RNA, 19 nt, Artificial Sequence
  source: /note="Description of Artificial Sequence: Synthetic oligonucleotide"
gugucgagaauauccaaga

SEQ ID NO: 698 - RNA, 19 nt, Artificial Sequence
  source: /note="Description of Artificial Sequence: Synthetic oligonucleotide"
ugugucgagaauauccaag

SEQ ID NO: 699 - RNA, 19 nt, Artificial Sequence
  source: /note="Description of Artificial Sequence: Synthetic oligonucleotide"
ucccucauugcacuguacu

SEQ ID NO: 700 - RNA, 19 nt, Artificial Sequence
  source: /note="Description of Artificial Sequence: Synthetic oligonucleotide"
gucccucauugcacuguac

SEQ ID NO: 701 - RNA, 19 nt, Artificial Sequence
  source: /note="Description of Artificial Sequence: Synthetic oligonucleotide"
ggucccucauugcacugua

SEQ ID NO: 702 - RNA, 19 nt, Artificial Sequence
  source: /note="Description of Artificial Sequence: Synthetic oligonucleotide"
uggucccucauugcacugu

SEQ ID NO: 703 - RNA, 19 nt, Artificial Sequence
  source: /note="Description of Artificial Sequence: Synthetic oligonucleotide"
cuggucccucauugcacug

SEQ ID NO: 704 - RNA, 19 nt, Artificial Sequence
  source: /note="Description of Artificial Sequence: Synthetic oligonucleotide"
acuggucccucauugcacu

SEQ ID NO: 705 - RNA, 19 nt, Artificial Sequence
  source: /note="Description of Artificial Sequence: Synthetic oligonucleotide"
uacuggucccucauugcac

SEQ ID NO: 706 - RNA, 19 nt, Artificial Sequence
  source: /note="Description of Artificial Sequence: Synthetic oligonucleotide"
guacuggucccucauugca

SEQ ID NO: 707 - RNA, 19 nt, Artificial Sequence
  source: /note="Description of Artificial Sequence: Synthetic oligonucleotide"
uguacuggucccucauugc

SEQ ID NO: 708 - RNA, 19 nt, Artificial Sequence
  source: /note="Description of Artificial Sequence: Synthetic oligonucleotide"
auguacuggucccucauug

SEQ ID NO: 709 - RNA, 19 nt, Artificial Sequence
  source: /note="Description of Artificial Sequence: Synthetic oligonucleotide"
cauguacuggucccucauu

SEQ ID NO: 710 - RNA, 19 nt, Artificial Sequence
  source: /note="Description of Artificial Sequence: Synthetic oligonucleotide"
ucauguacuggucccucau

SEQ ID NO: 711 - RNA, 19 nt, Artificial Sequence
  source: /note="Description of Artificial Sequence: Synthetic oligonucleotide"
cucauguacuggucccuca

SEQ ID NO: 712 - RNA, 19 nt, Artificial Sequence
  source: /note="Description of Artificial Sequence: Synthetic oligonucleotide"
ccucauguacuggucccuc

SEQ ID NO: 713 - RNA, 19 nt, Artificial Sequence
  source: /note="Description of Artificial Sequence: Synthetic oligonucleotide"
uccucauguacuggucccu

SEQ ID NO: 714 - RNA, 19 nt, Artificial Sequence
  source: /note="Description of Artificial Sequence: Synthetic oligonucleotide"
guccucauguacugguccc

SEQ ID NO: 715 - RNA, 19 nt, Artificial Sequence
  source: /note="Description of Artificial Sequence: Synthetic oligonucleotide"
aguccucauguacuggucc

SEQ ID NO: 716 - RNA, 19 nt, Artificial Sequence
  source: /note="Description of Artificial Sequence: Synthetic oligonucleotide"
caguccucauguacugguc

SEQ ID NO: 717 - RNA, 19 nt, Artificial Sequence
  source: /note="Description of Artificial Sequence: Synthetic oligonucleotide"
ccaguccucauguacuggu

SEQ ID NO: 718 - RNA, 19 nt, Artificial Sequence
  source: /note="Description of Artificial Sequence: Synthetic oligonucleotide"
cccaguccucauguacugg

SEQ ID NO: 719 - RNA, 19 nt, Artificial Sequence
  source: /note="Description of Artificial Sequence: Synthetic oligonucleotide"
ccccaguccucauguacug

SEQ ID NO: 720 - RNA, 19 nt, Artificial Sequence
  source: /note="Description of Artificial Sequence: Synthetic oligonucleotide"
uccccaguccucauguacu

SEQ ID NO: 721 - RNA, 19 nt, Artificial Sequence
  source: /note="Description of Artificial Sequence: Synthetic oligonucleotide"
cuccccaguccucauguac

SEQ ID NO: 722 - RNA, 19 nt, Artificial Sequence
  source: /note="Description of Artificial Sequence: Synthetic oligonucleotide"
ccuccccaguccucaugua

SEQ ID NO: 723 - RNA, 19 nt, Artificial Sequence
  source: /note="Description of Artificial Sequence: Synthetic oligonucleotide"
cccuccccaguccucaugu

SEQ ID NO: 724 - RNA, 19 nt, Artificial Sequence
  source: /note="Description of Artificial Sequence: Synthetic oligonucleotide"
gcccuccccaguccucaug

SEQ ID NO: 725 - RNA, 19 nt, Artificial Sequence
  source: /note="Description of Artificial Sequence: Synthetic oligonucleotide"
agcccuccccaguccucau

SEQ ID NO: 726 - RNA, 19 nt, Artificial Sequence
  source: /note="Description of Artificial Sequence: Synthetic oligonucleotide"
aagcccuccccaguccuca

SEQ ID NO: 727 - RNA, 19 nt, Artificial Sequence
  source: /note="Description of Artificial Sequence: Synthetic oligonucleotide"
aaagcccuccccaguccuc

SEQ ID NO: 728 - RNA, 19 nt, Artificial Sequence
  source: /note="Description of Artificial Sequence: Synthetic oligonucleotide"
gaaagcccuccccaguccu

SEQ ID NO: 729 - RNA, 19 nt, Artificial Sequence
  source: /note="Description of Artificial Sequence: Synthetic oligonucleotide"
agaaagcccuccccagucc

SEQ ID NO: 730 - RNA, 19 nt, Artificial Sequence
  source: /note="Description of Artificial Sequence: Synthetic oligonucleotide"
aagaaagcccuccccaguc

SEQ ID NO: 731 - RNA, 19 nt, Artificial Sequence
  source: /note="Description of Artificial Sequence: Synthetic oligonucleotide"
aaagaaagcccuccccagu

SEQ ID NO: 732 - RNA, 19 nt, Artificial Sequence
  source: /note="Description of Artificial Sequence: Synthetic oligonucleotide"
caaagaaagcccuccccag

SEQ ID NO: 733 - RNA, 19 nt, Artificial Sequence
  source: /note="Description of Artificial Sequence: Synthetic oligonucleotide"
acaaagaaagcccucccca

SEQ ID NO: 734 - RNA, 19 nt, Artificial Sequence
  source: /note="Description of Artificial Sequence: Synthetic oligonucleotide"
uuaguauuauuuauggcaa

SEQ ID NO: 735 - RNA, 19 nt, Artificial Sequence
  source: /note="Description of Artificial Sequence: Synthetic oligonucleotide"
uuuaguauuauuuauggca

SEQ ID NO: 736 - RNA, 19 nt, Artificial Sequence
  source: /note="Description of Artificial Sequence: Synthetic oligonucleotide"
auuuaguauuauuuauggc

SEQ ID NO: 737 - RNA, 19 nt, Artificial Sequence
  source: /note="Description of Artificial Sequence: Synthetic oligonucleotide"
gauuuaguauuauuuaugg

SEQ ID NO: 738 - RNA, 19 nt, Artificial Sequence
  source: /note="Description of Artificial Sequence: Synthetic oligonucleotide"
ugauuuaguauuauuuaug

SEQ ID NO: 739 - RNA, 19 nt, Artificial Sequence
  source: /note="Description of Artificial Sequence: Synthetic oligonucleotide"
augauuuaguauuauuuau

SEQ ID NO: 740 - RNA, 19 nt, Artificial Sequence
  source: /note="Description of Artificial Sequence: Synthetic oligonucleotide"
aaugauuuaguauuauuua

SEQ ID NO: 741 - RNA, 19 nt, Artificial Sequence
  source: /note="Description of Artificial Sequence: Synthetic oligonucleotide"
aaaugauuuaguauuauuu

SEQ ID NO: 742 - RNA, 19 nt, Artificial Sequence
  source: /note="Description of Artificial Sequence: Synthetic oligonucleotide"
caaaugauuuaguauuauu

SEQ ID NO: 743 - RNA, 19 nt, Artificial Sequence
  source: /note="Description of Artificial Sequence: Synthetic oligonucleotide"
ucaaaugauuuaguauuau

SEQ ID NO: 744 - RNA, 19 nt, Artificial Sequence
  source: /note="Description of Artificial Sequence: Synthetic oligonucleotide"
uucaaaugauuuaguauua

SEQ ID NO: 745 - RNA, 19 nt, Artificial Sequence
  source: /note="Description of Artificial Sequence: Synthetic oligonucleotide"
cuucaaaugauuuaguauu

SEQ ID NO: 746 - RNA, 19 nt, Artificial Sequence
  source: /note="Description of Artificial Sequence: Synthetic oligonucleotide"
ucuucaaaugauuuaguau

SEQ ID NO: 747 - RNA, 19 nt, Artificial Sequence
  source: /note="Description of Artificial Sequence: Synthetic oligonucleotide"
aucuucaaaugauuuagua

SEQ ID NO: 748 - RNA, 19 nt, Artificial Sequence
  source: /note="Description of Artificial Sequence: Synthetic oligonucleotide"
uaucuucaaaugauuuagu

SEQ ID NO: 749 - RNA, 19 nt, Artificial Sequence
  source: /note="Description of Artificial Sequence: Synthetic oligonucleotide"
auaucuucaaaugauuuag

SEQ ID NO: 750 - RNA, 19 nt, Artificial Sequence
  source: /note="Description of Artificial Sequence: Synthetic oligonucleotide"
aauaucuucaaaugauuua

SEQ ID NO: 751 - RNA, 19 nt, Artificial Sequence
  source: /note="Description of Artificial Sequence: Synthetic oligonucleotide"
gaauaucuucaaaugauuu

SEQ ID NO: 752 - RNA, 19 nt, Artificial Sequence
  source: /note="Description of Artificial Sequence: Synthetic oligonucleotide"
ugaauaucuucaaaugauu

SEQ ID NO: 753 - RNA, 19 nt, Artificial Sequence
  source: /note="Description of Artificial Sequence: Synthetic oligonucleotide"
ggugaauaucuucaaauga

SEQ ID NO: 754 - RNA, 19 nt, Artificial Sequence
  source: /note="Description of Artificial Sequence: Synthetic oligonucleotide"
uggugaauaucuucaaaug

SEQ ID NO: 755 - RNA, 19 nt, Artificial Sequence
  source: /note="Description of Artificial Sequence: Synthetic oligonucleotide"
auggugaauaucuucaaau

SEQ ID NO: 756 - RNA, 19 nt, Artificial Sequence
  source: /note="Description of Artificial Sequence: Synthetic oligonucleotide"
aauggugaauaucuucaaa

SEQ ID NO: 757 - RNA, 19 nt, Artificial Sequence
  source: /note="Description of Artificial Sequence: Synthetic oligonucleotide"
uaauggugaauaucuucaa

SEQ ID NO: 758 - RNA, 19 nt, Artificial Sequence
  source: /note="Description of Artificial Sequence: Synthetic oligonucleotide"
acucuuuuaauuuguucuc

SEQ ID NO: 759 - RNA, 19 nt, Artificial Sequence
  source: /note="Description of Artificial Sequence: Synthetic oligonucleotide"
aacucuuuuaauuuguucu

SEQ ID NO: 760 - RNA, 19 nt, Artificial Sequence
  source: /note="Description of Artificial Sequence: Synthetic oligonucleotide"
uaacucuuuuaauuuguuc

SEQ ID NO: 761 - RNA, 19 nt, Artificial Sequence
  source: /note="Description of Artificial Sequence: Synthetic oligonucleotide"
uuaacucuuuuaauuuguu

SEQ ID NO: 762 - RNA, 19 nt, Artificial Sequence
  source: /note="Description of Artificial Sequence: Synthetic oligonucleotide"
cuuaacucuuuuaauuugu

SEQ ID NO: 763 - RNA, 19 nt, Artificial Sequence
  source: /note="Description of Artificial Sequence: Synthetic oligonucleotide"
ccuuaacucuuuuaauuug

SEQ ID NO: 764 - RNA, 19 nt, Artificial Sequence
  source: /note="Description of Artificial Sequence: Synthetic oligonucleotide"
uccuuaacucuuuuaauuu

SEQ ID NO: 765 - RNA, 19 nt, Artificial Sequence
  source: /note="Description of Artificial Sequence: Synthetic oligonucleotide"
guccuuaacucuuuuaauu

SEQ ID NO: 766 - RNA, 19 nt, Artificial Sequence
  source: /note="Description of Artificial Sequence: Synthetic oligonucleotide"
aguccuuaacucuuuuaau

SEQ ID NO: 767 - RNA, 19 nt, Artificial Sequence
  source: /note="Description of Artificial Sequence: Synthetic oligonucleotide"
gaguccuuaacucuuuuaa

SEQ ID NO: 768 - RNA, 19 nt, Artificial Sequence
  source: /note="Description of Artificial Sequence: Synthetic oligonucleotide"
agaguccuuaacucuuuua

SEQ ID NO: 769 - RNA, 19 nt, Artificial Sequence
  source: /note="Description of Artificial Sequence: Synthetic oligonucleotide"
cagaguccuuaacucuuuu

SEQ ID NO: 770 - RNA, 19 nt, Artificial Sequence
  source: /note="Description of Artificial Sequence: Synthetic oligonucleotide"
ucagaguccuuaacucuuu

SEQ ID NO: 771 - RNA, 19 nt, Artificial Sequence
  source: /note="Description of Artificial Sequence: Synthetic oligonucleotide"
uucagaguccuuaacucuu

SEQ ID NO: 772 - RNA, 19 nt, Artificial Sequence
  source: /note="Description of Artificial Sequence: Synthetic oligonucleotide"
ucuucagaguccuuaacuc

SEQ ID NO: 773 - RNA, 19 nt, Artificial Sequence
  source: /note="Description of Artificial Sequence: Synthetic oligonucleotide"
aucuucagaguccuuaacu

SEQ ID NO: 774 - RNA, 19 nt, Artificial Sequence
  source: /note="Description of Artificial Sequence: Synthetic oligonucleotide"
caucuucagaguccuuaac

SEQ ID NO: 775 - RNA, 19 nt, Artificial Sequence
  source: /note="Description of Artificial Sequence: Synthetic oligonucleotide"
acaucuucagaguccuuaa

SEQ ID NO: 776 - RNA, 19 nt, Artificial Sequence
  source: /note="Description of Artificial Sequence: Synthetic oligonucleotide"
guacaucuucagaguccuu

SEQ ID NO: 777 - RNA, 19 nt, Artificial Sequence
  source: /note="Description of Artificial Sequence: Synthetic oligonucleotide"
gguacaucuucagaguccu

SEQ ID NO: 778 - RNA, 19 nt, Artificial Sequence
  source: /note="Description of Artificial Sequence: Synthetic oligonucleotide"
agguacaucuucagagucc

SEQ ID NO: 779 - RNA, 19 nt, Artificial Sequence
  source: /note="Description of Artificial Sequence: Synthetic oligonucleotide"
uagguacaucuucagaguc

SEQ ID NO: 780 - RNA, 19 nt, Artificial Sequence
  source: /note="Description of Artificial Sequence: Synthetic oligonucleotide"
auagguacaucuucagagu

SEQ ID NO: 781 - RNA, 19 nt, Artificial Sequence
  source: /note="Description of Artificial Sequence: Synthetic oligonucleotide"
cauagguacaucuucagag

SEQ ID NO: 782 - RNA, 19 nt, Artificial Sequence
  source: /note="Description of Artificial Sequence: Synthetic oligonucleotide"
ccauagguacaucuucaga

SEQ ID NO: 783 - RNA, 19 nt, Artificial Sequence
  source: /note="Description of Artificial Sequence: Synthetic oligonucleotide"
accauagguacaucuucag

SEQ ID NO: 784 - RNA, 19 nt, Artificial Sequence
  source: /note="Description of Artificial Sequence: Synthetic oligonucleotide"
gaccauagguacaucuuca

SEQ ID NO: 785 - RNA, 19 nt, Artificial Sequence
  source: /note="Description of Artificial Sequence: Synthetic oligonucleotide"
aaucacauuuauuuccuac

SEQ ID NO: 786 - RNA, 19 nt, Artificial Sequence
  source: /note="Description of Artificial Sequence: Synthetic oligonucleotide"
aaaucacauuuauuuccua

SEQ ID NO: 787 - RNA, 19 nt, Artificial Sequence
  source: /note="Description of Artificial Sequence: Synthetic oligonucleotide"
caaaucacauuuauuuccu

SEQ ID NO: 788 - RNA, 19 nt, Artificial Sequence
  source: /note="Description of Artificial Sequence: Synthetic oligonucleotide"
gcaaaucacauuuauuucc

SEQ ID NO: 789 - RNA, 19 nt, Artificial Sequence
  source: /note="Description of Artificial Sequence: Synthetic oligonucleotide"
ggcaaaucacauuuauuuc

SEQ ID NO: 790 - RNA, 19 nt, Artificial Sequence
  source: /note="Description of Artificial Sequence: Synthetic oligonucleotide"
aggcaaaucacauuuauuu

SEQ ID NO: 791 - RNA, 19 nt, Artificial Sequence
  source: /note="Description of Artificial Sequence: Synthetic oligonucleotide"
aaggcaaaucacauuuauu

SEQ ID NO: 792 - RNA, 19 nt, Artificial Sequence
  source: /note="Description of Artificial Sequence: Synthetic oligonucleotide"
gaaggcaaaucacauuuau

SEQ ID NO: 793 - RNA, 19 nt, Artificial Sequence
  source: /note="Description of Artificial Sequence: Synthetic oligonucleotide"
agaaggcaaaucacauuua

SEQ ID NO: 794 - RNA, 19 nt, Artificial Sequence
  source: /note="Description of Artificial Sequence: Synthetic oligonucleotide"
uagaaggcaaaucacauuu

SEQ ID NO: 795 - RNA, 19 nt, Artificial Sequence
  source: /note="Description of Artificial Sequence: Synthetic oligonucleotide"
cuagaaggcaaaucacauu

SEQ ID NO: 796 - RNA, 19 nt, Artificial Sequence
  source: /note="Description of Artificial Sequence: Synthetic oligonucleotide"
ucuagaaggcaaaucacau

SEQ ID NO: 797 - RNA, 19 nt, Artificial Sequence
  source: /note="Description of Artificial Sequence: Synthetic oligonucleotide"
uucuagaaggcaaaucaca

SEQ ID NO: 798 - RNA, 19 nt, Artificial Sequence
  source: /note="Description of Artificial Sequence: Synthetic oligonucleotide"
guucuagaaggcaaaucac

SEQ ID NO: 799 - RNA, 19 nt, Artificial Sequence
  source: /note="Description of Artificial Sequence: Synthetic oligonucleotide"
uguucuagaaggcaaauca

SEQ ID NO: 800 - RNA, 19 nt, Artificial Sequence
  source: /note="Description of Artificial Sequence: Synthetic oligonucleotide"
cuguucuagaaggcaaauc

SEQ ID NO: 801 - RNA, 19 nt, Artificial Sequence
  source: /note="Description of Artificial Sequence: Synthetic oligonucleotide"
acuguucuagaaggcaaau

SEQ ID NO: 802 - RNA, 19 nt, Artificial Sequence
  source: /note="Description of Artificial Sequence: Synthetic oligonucleotide"
uacuguucuagaaggcaaa

SEQ ID NO: 803 - RNA, 19 nt, Artificial Sequence
  source: /note="Description of Artificial Sequence: Synthetic oligonucleotide"
ucuacuguucuagaaggca

SEQ ID NO: 804 - RNA, 19 nt, Artificial Sequence
  source: /note="Description of Artificial Sequence: Synthetic oligonucleotide"
gucuacuguucuagaaggc

SEQ ID NO: 805 - RNA, 19 nt, Artificial Sequence
  source: /note="Description of Artificial Sequence: Synthetic oligonucleotide"
ugucuacuguucuagaagg

SEQ ID NO: 806 - RNA, 19 nt, Artificial Sequence
  source: /note="Description of Artificial Sequence: Synthetic oligonucleotide"
gugucuacuguucuagaag

SEQ ID NO: 807 - RNA, 19 nt, Artificial Sequence
  source: /note="Description of Artificial Sequence: Synthetic oligonucleotide"
ugugucuacuguucuagaa

SEQ ID NO: 808 - RNA, 19 nt, Artificial Sequence
  source: /note="Description of Artificial Sequence: Synthetic oligonucleotide"
uugugucuacuguucuaga

SEQ ID NO: 809 - RNA, 19 nt, Artificial Sequence
  source: /note="Description of Artificial Sequence: Synthetic oligonucleotide"
uuugugucuacuguucuag

SEQ ID NO: 810 - RNA, 19 nt, Artificial Sequence
  source: /note="Description of Artificial Sequence: Synthetic oligonucleotide"
uuuugugucuacuguucua

SEQ ID NO: 811 - RNA, 19 nt, Artificial Sequence
  source: /note="Description of Artificial Sequence: Synthetic oligonucleotide"
guuuugugucuacuguucu

SEQ ID NO: 812 - RNA, 19 nt, Artificial Sequence
  source: /note="Description of Artificial Sequence: Synthetic oligonucleotide"
uguuuugugucuacuguuc

SEQ ID NO: 813 - RNA, 19 nt, Artificial Sequence
  source: /note="Description of Artificial Sequence: Synthetic oligonucleotide"
cuguuuugugucuacuguu

SEQ ID NO: 814 - RNA, 19 nt, Artificial Sequence
  source: /note="Description of Artificial Sequence: Synthetic oligonucleotide"
ccuguuuugugucuacugu

SEQ ID NO: 815 - RNA, 19 nt, Artificial Sequence
  source: /note="Description of Artificial Sequence: Synthetic oligonucleotide"
gccuguuuugugucuacug

SEQ ID NO: 816 - RNA, 19 nt, Artificial Sequence
  source: /note="Description of Artificial Sequence: Synthetic oligonucleotide"
agccuguuuugugucuacu

SEQ ID NO: 817 - RNA, 19 nt, Artificial Sequence
  source: /note="Description of Artificial Sequence: Synthetic oligonucleotide"
gagccuguuuugugucuac

SEQ ID NO: 818 - RNA, 19 nt, Artificial Sequence
  source: /note="Description of Artificial Sequence: Synthetic oligonucleotide"
ugagccuguuuugugucua

SEQ ID NO: 819 - RNA, 19 nt, Artificial Sequence
  source: /note="Description of Artificial Sequence: Synthetic oligonucleotide"
cugagccuguuuugugucu

SEQ ID NO: 820 - RNA, 19 nt, Artificial Sequence
  source: /note="Description of Artificial Sequence: Synthetic oligonucleotide"
ccugagccuguuuuguguc

SEQ ID NO: 821 - RNA, 19 nt, Artificial Sequence
  source: /note="Description of Artificial Sequence: Synthetic oligonucleotide"
uccugagccuguuuugugu

SEQ ID NO: 822 - RNA, 19 nt, Artificial Sequence
  source: /note="Description of Artificial Sequence: Synthetic oligonucleotide"
guccugagccuguuuugug

SEQ ID NO: 823 - RNA, 19 nt, Artificial Sequence
  source: /note="Description of Artificial Sequence: Synthetic oligonucleotide"
aguccugagccuguuuugu

SEQ ID NO: 824 - RNA, 19 nt, Artificial Sequence
  source: /note="Description of Artificial Sequence: Synthetic oligonucleotide"
aaguccugagccuguuuug

SEQ ID NO: 825 - RNA, 19 nt, Artificial Sequence
  source: /note="Description of Artificial Sequence: Synthetic oligonucleotide"
uaaguccugagccuguuuu

SEQ ID NO: 826 - RNA, 19 nt, Artificial Sequence
  source: /note="Description of Artificial Sequence: Synthetic oligonucleotide"
cuaaguccugagccuguuu

SEQ ID NO: 827 - RNA, 19 nt, Artificial Sequence
  source: /note="Description of Artificial Sequence: Synthetic oligonucleotide"
gcuaaguccugagccuguu

SEQ ID NO: 828 - RNA, 19 nt, Artificial Sequence
  source: /note="Description of Artificial Sequence: Synthetic oligonucleotide"
ugcuaaguccugagccugu

SEQ ID NO: 829 - RNA, 19 nt, Artificial Sequence
  source: /note="Description of Artificial Sequence: Synthetic oligonucleotide"
uugcuaaguccugagccug

SEQ ID NO: 830 - RNA, 19 nt, Artificial Sequence
  source: /note="Description of Artificial Sequence: Synthetic oligonucleotide"
cuugcuaaguccugagccu

SEQ ID NO: 831 - RNA, 19 nt, Artificial Sequence
  source: /note="Description of Artificial Sequence: Synthetic oligonucleotide"
ucuugcuaaguccugagcc

SEQ ID NO: 832 - RNA, 19 nt, Artificial Sequence
  source: /note="Description of Artificial Sequence: Synthetic oligonucleotide"
uucuugcuaaguccugagc

SEQ ID NO: 833 - RNA, 19 nt, Artificial Sequence
  source: /note="Description of Artificial Sequence: Synthetic oligonucleotide"
cuucuugcuaaguccugag

SEQ ID NO: 834 - RNA, 19 nt, Artificial Sequence
  source: /note="Description of Artificial Sequence: Synthetic oligonucleotide"
acuucuugcuaaguccuga

SEQ ID NO: 835 - RNA, 19 nt, Artificial Sequence
  source: /note="Description of Artificial Sequence: Synthetic oligonucleotide"
aacuucuugcuaaguccug

SEQ ID NO: 836 - RNA, 19 nt, Artificial Sequence
  source: /note="Description of Artificial Sequence: Synthetic oligonucleotide"
uaacuucuugcuaaguccu

SEQ ID NO: 837 - RNA, 19 nt, Artificial Sequence
  source: /note="Description of Artificial Sequence: Synthetic oligonucleotide"
auaacuucuugcuaagucc

SEQ ID NO: 838 - RNA, 19 nt, Artificial Sequence
  source: /note="Description of Artificial Sequence: Synthetic oligonucleotide"
cauaacuucuugcuaaguc

SEQ ID NO: 839 - RNA, 19 nt, Artificial Sequence
  source: /note="Description of Artificial Sequence: Synthetic oligonucleotide"
ccauaacuucuugcuaagu

SEQ ID NO: 840 - RNA, 19 nt, Artificial Sequence
  source: /note="Description of Artificial Sequence: Synthetic oligonucleotide"
uccauaacuucuugcuaag

SEQ ID NO: 841 - RNA, 19 nt, Artificial Sequence
  source: /note="Description of Artificial Sequence: Synthetic oligonucleotide"
uuccauaacuucuugcuaa

SEQ ID NO: 842 - RNA, 19 nt, Artificial Sequence
  source: /note="Description of Artificial Sequence: Synthetic oligonucleotide"
auuccauaacuucuugcua

SEQ ID NO: 843 - RNA, 19 nt, Artificial Sequence
  source: /note="Description of Artificial Sequence: Synthetic oligonucleotide"
aauuccauaacuucuugcu

SEQ ID NO: 844 - RNA, 19 nt, Artificial Sequence
  source: /note="Description of Artificial Sequence: Synthetic oligonucleotide"
gaauuccauaacuucuugc

SEQ ID NO: 845 - RNA, 19 nt, Artificial Sequence
  source: /note="Description of Artificial Sequence: Synthetic oligonucleotide"
ggaauuccauaacuucuug

SEQ ID NO: 846 - RNA, 19 nt, Artificial Sequence
  source: /note="Description of Artificial Sequence: Synthetic oligonucleotide"
aggaauuccauaacuucuu

SEQ ID NO: 847 - RNA, 19 nt, Artificial Sequence
  source: /note="Description of Artificial Sequence: Synthetic oligonucleotide"
aaggaauuccauaacuucu

SEQ ID NO: 848 - RNA, 19 nt, Artificial Sequence
  source: /note="Description of Artificial Sequence: Synthetic oligonucleotide"
aaaggaauuccauaacuuc

SEQ ID NO: 849 - RNA, 19 nt, Artificial Sequence
  source: /note="Description of Artificial Sequence: Synthetic oligonucleotide"
aaaaggaauuccauaacuu

SEQ ID NO: 850 - RNA, 19 nt, Artificial Sequence
  source: /note="Description of Artificial Sequence: Synthetic oligonucleotide"
uaaaaggaauuccauaacu

SEQ ID NO: 851 - RNA, 19 nt, Artificial Sequence
  source: /note="Description of Artificial Sequence: Synthetic oligonucleotide"
auaaaaggaauuccauaac

SEQ ID NO: 852 - RNA, 19 nt, Artificial Sequence
  source: /note="Description of Artificial Sequence: Synthetic oligonucleotide"
aauaaaaggaauuccauaa

SEQ ID NO: 853 - RNA, 19 nt, Artificial Sequence
  source: /note="Description of Artificial Sequence: Synthetic oligonucleotide"
caauaaaaggaauuccaua

SEQ ID NO: 854 - RNA, 19 nt, Artificial Sequence
  source: /note="Description of Artificial Sequence: Synthetic oligonucleotide"
ucaauaaaaggaauuccau

SEQ ID NO: 855 - DNA, 21 bp, Artificial Sequence
  source: /note="Description of Artificial Sequence: Synthetic oligonucleotide"
  source: /note="Description of Combined DNA/RNA Molecule: Synthetic oligonucleotide"
ggacgaauaugauccaacatt

SEQ ID NO: 856 - DNA, 21 bp, Artificial Sequence
  source: /note="Description of Artificial Sequence: Synthetic oligonucleotide"
  source: /note="Description of Combined DNA/RNA Molecule: Synthetic oligonucleotide"
gacgaauaugauccaacaatt

SEQ ID NO: 857 - DNA, 21 bp, Artificial Sequence
  source: /note="Description of Artificial Sequence: Synthetic oligonucleotide"
  source: /note="Description of Combined DNA/RNA Molecule: Synthetic oligonucleotide"
acgaauaugauccaacaautt

SEQ ID NO: 858 - DNA, 21 bp, Artificial Sequence
  source: /note="Description of Artificial Sequence: Synthetic oligonucleotide"
  source: /note="Description of Combined DNA/RNA Molecule: Synthetic oligonucleotide"
cgaauaugauccaacaauatt

SEQ ID NO: 859 - DNA, 21 bp, Artificial Sequence
  source: /note="Description of Artificial Sequence: Synthetic oligonucleotide"
  source: /note="Description of Combined DNA/RNA Molecule: Synthetic oligonucleotide"
gaauaugauccaacaauagtt

SEQ ID NO: 860 - DNA, 21 bp, Artificial Sequence
  source: /note="Description of Artificial Sequence: Synthetic oligonucleotide"
  source: /note="Description of Combined DNA/RNA Molecule: Synthetic oligonucleotide"
aauaugauccaacaauagatt

SEQ ID NO: 861 - DNA, 21 bp, Artificial Sequence
  source: /note="Description of Artificial Sequence: Synthetic oligonucleotide"
  source: /note="Description of Combined DNA/RNA Molecule: Synthetic oligonucleotide"
auaugauccaacaauagagtt

SEQ ID NO: 862 - DNA, 21 bp, Artificial Sequence
  source: /note="Description of Artificial Sequence: Synthetic oligonucleotide"
  source: /note="Description of Combined DNA/RNA Molecule: Synthetic oligonucleotide"
uaugauccaacaauagaggtt

SEQ ID NO: 863 - DNA, 21 bp, Artificial Sequence
  source: /note="Description of Artificial Sequence: Synthetic oligonucleotide"
  source: /note="Description of Combined DNA/RNA Molecule: Synthetic oligonucleotide"
augauccaacaauagaggatt

SEQ ID NO: 864 - DNA, 21 bp, Artificial Sequence
  source: /note="Description of Artificial Sequence: Synthetic oligonucleotide"
  source: /note="Description of Combined DNA/RNA Molecule: Synthetic oligonucleotide"
ugauccaacaauagaggautt

SEQ ID NO: 865 - DNA, 21 bp, Artificial Sequence
  source: /note="Description of Artificial Sequence: Synthetic oligonucleotide"
  source: /note="Description of Combined DNA/RNA Molecule: Synthetic oligonucleotide"
gauccaacaauagaggauutt

SEQ ID NO: 866 - DNA, 21 bp, Artificial Sequence
  source: /note="Description of Artificial Sequence: Synthetic oligonucleotide"
  source: /note="Description of Combined DNA/RNA Molecule: Synthetic oligonucleotide"
auccaacaauagaggauuctt

SEQ ID NO: 867 - DNA, 21 bp, Artificial Sequence
  source: /note="Description of Artificial Sequence: Synthetic oligonucleotide"
  source: /note="Description of Combined DNA/RNA Molecule: Synthetic oligonucleotide"
uccaacaauagaggauucctt

SEQ ID NO: 868 - DNA, 21 bp, Artificial Sequence
  source: /note="Description of Artificial Sequence: Synthetic oligonucleotide"
  source: /note="Description of Combined DNA/RNA Molecule: Synthetic oligonucleotide"
ccaacaauagaggauuccutt

SEQ ID NO: 869 - DNA, 21 bp, Artificial Sequence
  source: /note="Description of Artificial Sequence: Synthetic oligonucleotide"
  source: /note="Description of Combined DNA/RNA Molecule: Synthetic oligonucleotide"
caacaauagaggauuccuatt

SEQ ID NO: 870 - DNA, 21 bp, Artificial Sequence
  source: /note="Description of Artificial Sequence: Synthetic oligonucleotide"
  source: /note="Description of Combined DNA/RNA Molecule: Synthetic oligonucleotide"
aacaauagaggauuccuactt

SEQ ID NO: 871 - DNA, 21 bp, Artificial Sequence
  source: /note="Description of Artificial Sequence: Synthetic oligonucleotide"
  source: /note="Description of Combined DNA/RNA Molecule: Synthetic oligonucleotide"
acaauagaggauuccuacatt

SEQ ID NO: 872 - DNA, 21 bp, Artificial Sequence
  source: /note="Description of Artificial Sequence: Synthetic oligonucleotide"
  source: /note="Description of Combined DNA/RNA Molecule: Synthetic oligonucleotide"
caauagaggauuccuacagtt

SEQ ID NO: 873 - DNA, 21 bp, Artificial Sequence
  source: /note="Description of Artificial Sequence: Synthetic oligonucleotide"
  source: /note="Description of Combined DNA/RNA Molecule: Synthetic oligonucleotide"
aauagaggauuccuacaggtt

SEQ ID NO: 874 - DNA, 21 bp, Artificial Sequence
  source: /note="Description of Artificial Sequence: Synthetic oligonucleotide"
  source: /note="Description of Combined DNA/RNA Molecule: Synthetic oligonucleotide"
auagaggauuccuacaggatt

SEQ ID NO: 875 - DNA, 21 bp, Artificial Sequence
  source: /note="Description of Artificial Sequence: Synthetic oligonucleotide"
  source: /note="Description of Combined DNA/RNA Molecule: Synthetic oligonucleotide"
uagaggauuccuacaggaatt

SEQ ID NO: 876 - DNA, 21 bp, Artificial Sequence
  source: /note="Description of Artificial Sequence: Synthetic oligonucleotide"
  source: /note="Description of Combined DNA/RNA Molecule: Synthetic oligonucleotide"
agaggauuccuacaggaagtt

SEQ ID NO: 877 - DNA, 21 bp, Artificial Sequence
  source: /note="Description of Artificial Sequence: Synthetic oligonucleotide"
  source: /note="Description of Combined DNA/RNA Molecule: Synthetic oligonucleotide"
gaggauuccuacaggaagctt

SEQ ID NO: 878 - DNA, 21 bp, Artificial Sequence
  source: /note="Description of Artificial Sequence: Synthetic oligonucleotide"
  source: /note="Description of Combined DNA/RNA Molecule: Synthetic oligonucleotide"
aggauuccuacaggaagcatt

SEQ ID NO: 879 - DNA, 21 bp, Artificial Sequence
  source: /note="Description of Artificial Sequence: Synthetic oligonucleotide"
  source: /note="Description of Combined DNA/RNA Molecule: Synthetic oligonucleotide"
ggauuccuacaggaagcaatt

SEQ ID NO: 880 - DNA, 21 bp, Artificial Sequence
  source: /note="Description of Artificial Sequence: Synthetic oligonucleotide"
  source: /note="Description of Combined DNA/RNA Molecule: Synthetic oligonucleotide"
gauuccuacaggaagcaagtt

SEQ ID NO: 881 - DNA, 21 bp, Artificial Sequence
  source: /note="Description of Artificial Sequence: Synthetic oligonucleotide"
  source: /note="Description of Combined DNA/RNA Molecule: Synthetic oligonucleotide"
auuccuacaggaagcaagutt

SEQ ID NO: 882 - DNA, 21 bp, Artificial Sequence
  source: /note="Description of Artificial Sequence: Synthetic oligonucleotide"
  source: /note="Description of Combined DNA/RNA Molecule: Synthetic oligonucleotide"
uuccuacaggaagcaaguatt

SEQ ID NO: 883 - DNA, 21 bp, Artificial Sequence
  source: /note="Description of Artificial Sequence: Synthetic oligonucleotide"
  source: /note="Description of Combined DNA/RNA Molecule: Synthetic oligonucleotide"
uccuacaggaagcaaguagtt

SEQ ID NO: 884 - DNA, 21 bp, Artificial Sequence
  source: /note="Description of Artificial Sequence: Synthetic oligonucleotide"
  source: /note="Description of Combined DNA/RNA Molecule: Synthetic oligonucleotide"
ccuacaggaagcaaguagutt

SEQ ID NO: 885 - DNA, 21 bp, Artificial Sequence
  source: /note="Description of Artificial Sequence: Synthetic oligonucleotide"
  source: /note="Description of Combined DNA/RNA Molecule: Synthetic oligonucleotide"
cuacaggaagcaaguaguatt

SEQ ID NO: 886 - DNA, 21 bp, Artificial Sequence
  source: /note="Description of Artificial Sequence: Synthetic oligonucleotide"
  source: /note="Description of Combined DNA/RNA Molecule: Synthetic oligonucleotide"
uacaggaagcaaguaguaatt

SEQ ID NO: 887 - DNA, 21 bp, Artificial Sequence
  source: /note="Description of Artificial Sequence: Synthetic oligonucleotide"
  source: /note="Description of Combined DNA/RNA Molecule: Synthetic oligonucleotide"
acaggaagcaaguaguaautt

SEQ ID NO: 888 - DNA, 21 bp, Artificial Sequence
  source: /note="Description of Artificial Sequence: Synthetic oligonucleotide"
  source: /note="Description of Combined DNA/RNA Molecule: Synthetic oligonucleotide"
caggaagcaaguaguaauutt

SEQ ID NO: 889 - DNA, 21 bp, Artificial Sequence
  source: /note="Description of Artificial Sequence: Synthetic oligonucleotide"
  source: /note="Description of Combined DNA/RNA Molecule: Synthetic oligonucleotide"
uuggauauucucgacacagtt

SEQ ID NO: 890 - DNA, 21 bp, Artificial Sequence
  source: /note="Description of Artificial Sequence: Synthetic oligonucleotide"
  source: /note="Description of Combined DNA/RNA Molecule: Synthetic oligonucleotide"
uggauauucucgacacagctt

SEQ ID NO: 891 - DNA, 21 bp, Artificial Sequence
  source: /note="Description of Artificial Sequence: Synthetic oligonucleotide"
  source: /note="Description of Combined DNA/RNA Molecule: Synthetic oligonucleotide"
ggauauucucgacacagcatt

SEQ ID NO: 892 - DNA, 21 bp, Artificial Sequence
  source: /note="Description of Artificial Sequence: Synthetic oligonucleotide"
  source: /note="Description of Combined DNA/RNA Molecule: Synthetic oligonucleotide"
auauucucgacacagcaggtt

SEQ ID NO: 893 - DNA, 21 bp, Artificial Sequence
  source: /note="Description of Artificial Sequence: Synthetic oligonucleotide"
  source: /note="Description of Combined DNA/RNA Molecule: Synthetic oligonucleotide"
auucucgacacagcagguctt

SEQ ID NO: 894 - DNA, 21 bp, Artificial Sequence
  source: /note="Description of Artificial Sequence: Synthetic oligonucleotide"
  source: /note="Description of Combined DNA/RNA Molecule: Synthetic oligonucleotide"
ucucgacacagcaggucaatt

SEQ ID NO: 895 - DNA, 21 bp, Artificial Sequence
  source: /note="Description of Artificial Sequence: Synthetic oligonucleotide"
  source: /note="Description of Combined DNA/RNA Molecule: Synthetic oligonucleotide"
cucgacacagcaggucaagtt

SEQ ID NO: 896 - DNA, 21 bp, Artificial Sequence
  source: /note="Description of Artificial Sequence: Synthetic oligonucleotide"
  source: /note="Description of Combined DNA/RNA Molecule: Synthetic oligonucleotide"
ucgacacagcaggucaagatt

SEQ ID NO: 897 - DNA, 21 bp, Artificial Sequence
  source: /note="Description of Artificial Sequence: Synthetic oligonucleotide"
  source: /note="Description of Combined DNA/RNA Molecule: Synthetic oligonucleotide"
cgacacagcaggucaagagtt

SEQ ID NO: 898 - DNA, 21 bp, Artificial Sequence
  source: /note="Description of Artificial Sequence: Synthetic oligonucleotide"
  source: /note="Description of Combined DNA/RNA Molecule: Synthetic oligonucleotide"
gacacagcaggucaagaggtt

SEQ ID NO: 899 - DNA, 21 bp, Artificial Sequence
  source: /note="Description of Artificial Sequence: Synthetic oligonucleotide"
  source: /note="Description of Combined DNA/RNA Molecule: Synthetic oligonucleotide"
acacagcaggucaagaggatt

SEQ ID NO: 900 - DNA, 21 bp, Artificial Sequence
  source: /note="Description of Artificial Sequence: Synthetic oligonucleotide"
  source: /note="Description of Combined DNA/RNA Molecule: Synthetic oligonucleotide"
cacagcaggucaagaggagtt

SEQ ID NO: 901 - DNA, 21 bp, Artificial Sequence
  source: /note="Description of Artificial Sequence: Synthetic oligonucleotide"
  source: /note="Description of Combined DNA/RNA Molecule: Synthetic oligonucleotide"
acagcaggucaagaggagutt

SEQ ID NO: 902 - DNA, 21 bp, Artificial Sequence
  source: /note="Description of Artificial Sequence: Synthetic oligonucleotide"
  source: /note="Description of Combined DNA/RNA Molecule: Synthetic oligonucleotide"
cagcaggucaagaggaguatt

SEQ ID NO: 903 - DNA, 21 bp, Artificial Sequence
  source: /note="Description of Artificial Sequence: Synthetic oligonucleotide"
  source: /note="Description of Combined DNA/RNA Molecule: Synthetic oligonucleotide"
agcaggucaagaggaguactt

SEQ ID NO: 904 - DNA, 21 bp, Artificial Sequence
  source: /note="Description of Artificial Sequence: Synthetic oligonucleotide"
  source: /note="Description of Combined DNA/RNA Molecule: Synthetic oligonucleotide"
gcaggucaagaggaguacatt

SEQ ID NO: 905 - DNA, 21 bp, Artificial Sequence
  source: /note="Description of Artificial Sequence: Synthetic oligonucleotide"
  source: /note="Description of Combined DNA/RNA Molecule: Synthetic oligonucleotide"
caggucaagaggaguacagtt

SEQ ID NO: 906 - DNA, 21 bp, Artificial Sequence
  source: /note="Description of Artificial Sequence: Synthetic oligonucleotide"
  source: /note="Description of Combined DNA/RNA Molecule: Synthetic oligonucleotide"
aggucaagaggaguacagutt

SEQ ID NO: 907 - DNA, 21 bp, Artificial Sequence
  source: /note="Description of Artificial Sequence: Synthetic oligonucleotide"
  source: /note="Description of Combined DNA/RNA Molecule: Synthetic oligonucleotide"
ggucaagaggaguacagugtt

SEQ ID NO: 908 - DNA, 21 bp, Artificial Sequence
  source: /note="Description of Artificial Sequence: Synthetic oligonucleotide"
  source: /note="Description of Combined DNA/RNA Molecule: Synthetic oligonucleotide"
gucaagaggaguacagugctt

SEQ ID NO: 909 - DNA, 21 bp, Artificial Sequence
  source: /note="Description of Artificial Sequence: Synthetic oligonucleotide"
  source: /note="Description of Combined DNA/RNA Molecule: Synthetic oligonucleotide"
ucaagaggaguacagugcatt

SEQ ID NO: 910 - DNA, 21 bp, Artificial Sequence
  source: /note="Description of Artificial Sequence: Synthetic oligonucleotide"
  source: /note="Description of Combined DNA/RNA Molecule: Synthetic oligonucleotide"
caagaggaguacagugcaatt

SEQ ID NO: 911 - DNA, 21 bp, Artificial Sequence
  source: /note="Description of Artificial Sequence: Synthetic oligonucleotide"
  source: /note="Description of Combined DNA/RNA Molecule: Synthetic oligonucleotide"
aagaggaguacagugcaautt

SEQ ID NO: 912 - DNA, 21 bp, Artificial Sequence
  source: /note="Description of Artificial Sequence: Synthetic oligonucleotide"
  source: /note="Description of Combined DNA/RNA Molecule: Synthetic oligonucleotide"
agaggaguacagugcaaugtt

SEQ ID NO: 913 - DNA, 21 bp, Artificial Sequence
  source: /note="Description of Artificial Sequence: Synthetic oligonucleotide"
  source: /note="Description of Combined DNA/RNA Molecule: Synthetic oligonucleotide"
gaggaguacagugcaaugatt

SEQ ID NO: 914 - DNA, 21 bp, Artificial Sequence
  source: /note="Description of Artificial Sequence: Synthetic oligonucleotide"
  source: /note="Description of Combined DNA/RNA Molecule: Synthetic oligonucleotide"
aggaguacagugcaaugagtt

SEQ ID NO: 915 - DNA, 21 bp, Artificial Sequence
  source: /note="Description of Artificial Sequence: Synthetic oligonucleotide"
  source: /note="Description of Combined DNA/RNA Molecule: Synthetic oligonucleotide"
ggaguacagugcaaugaggtt

SEQ ID NO: 916 - DNA, 21 bp, Artificial Sequence
  source: /note="Description of Artificial Sequence: Synthetic oligonucleotide"
  source: /note="Description of Combined DNA/RNA Molecule: Synthetic oligonucleotide"
gaguacagugcaaugagggtt

SEQ ID NO: 917 - DNA, 21 bp, Artificial Sequence
  source: /note="Description of Artificial Sequence: Synthetic oligonucleotide"
  source: /note="Description of Combined DNA/RNA Molecule: Synthetic oligonucleotide"
ggggagggcuuucuuugugtt

SEQ ID NO: 918 - DNA, 21 bp, Artificial Sequence
  source: /note="Description of Artificial Sequence: Synthetic oligonucleotide"
  source: /note="Description of Combined DNA/RNA Molecule: Synthetic oligonucleotide"
gggagggcuuucuuugugutt

SEQ ID NO: 919 - DNA, 21 bp, Artificial Sequence
  source: /note="Description of Artificial Sequence: Synthetic oligonucleotide"
  source: /note="Description of Combined DNA/RNA Molecule: Synthetic oligonucleotide"
ggagggcuuucuuuguguatt

SEQ ID NO: 920 - DNA, 21 bp, Artificial Sequence
  source: /note="Description of Artificial Sequence: Synthetic oligonucleotide"
  source: /note="Description of Combined DNA/RNA Molecule: Synthetic oligonucleotide"
gagggcuuucuuuguguautt

SEQ ID NO: 921 - DNA, 21 bp, Artificial Sequence
  source: /note="Description of Artificial Sequence: Synthetic oligonucleotide"
  source: /note="Description of Combined DNA/RNA Molecule: Synthetic oligonucleotide"
agggcuuucuuuguguauutt

SEQ ID NO: 922 - DNA, 21 bp, Artificial Sequence
  source: /note="Description of Artificial Sequence: Synthetic oligonucleotide"
  source: /note="Description of Combined DNA/RNA Molecule: Synthetic oligonucleotide"
gggcuuucuuuguguauuutt

SEQ ID NO: 923 - DNA, 21 bp, Artificial Sequence
  source: /note="Description of Artificial Sequence: Synthetic oligonucleotide"
  source: /note="Description of Combined DNA/RNA Molecule: Synthetic oligonucleotide"
ggcuuucuuuguguauuugtt

SEQ ID NO: 924 - DNA, 21 bp, Artificial Sequence
  source: /note="Description of Artificial Sequence: Synthetic oligonucleotide"
  source: /note="Description of Combined DNA/RNA Molecule: Synthetic oligonucleotide"
gcuuucuuuguguauuugctt

SEQ ID NO: 925 - DNA, 21 bp, Artificial Sequence
  source: /note="Description of Artificial Sequence: Synthetic oligonucleotide"
  source: /note="Description of Combined DNA/RNA Molecule: Synthetic oligonucleotide"
cuuucuuuguguauuugcctt

SEQ ID NO: 926 - DNA, 21 bp, Artificial Sequence
  source: /note="Description of Artificial Sequence: Synthetic oligonucleotide"
  source: /note="Description of Combined DNA/RNA Molecule: Synthetic oligonucleotide"
uuucuuuguguauuugccatt

SEQ ID NO: 927 - DNA, 21 bp, Artificial Sequence
  source: /note="Description of Artificial Sequence: Synthetic oligonucleotide"
  source: /note="Description of Combined DNA/RNA Molecule: Synthetic oligonucleotide"
uucuuuguguauuugccautt

SEQ ID NO: 928 - DNA, 21 bp, Artificial Sequence
  source: /note="Description of Artificial Sequence: Synthetic oligonucleotide"
  source: /note="Description of Combined DNA/RNA Molecule: Synthetic oligonucleotide"
ucuuuguguauuugccauatt

SEQ ID NO: 929 - DNA, 21 bp, Artificial Sequence
  source: /note="Description of Artificial Sequence: Synthetic oligonucleotide"
  source: /note="Description of Combined DNA/RNA Molecule: Synthetic oligonucleotide"
cuuuguguauuugccauaatt

SEQ ID NO: 930 - DNA, 21 bp, Artificial Sequence
  source: /note="Description of Artificial Sequence: Synthetic oligonucleotide"
  source: /note="Description of Combined DNA/RNA Molecule: Synthetic oligonucleotide"
uuuguguauuugccauaaatt

SEQ ID NO: 931 - DNA, 21 bp, Artificial Sequence
  source: /note="Description of Artificial Sequence: Synthetic oligonucleotide"
  source: /note="Description of Combined DNA/RNA Molecule: Synthetic oligonucleotide"
uuguguauuugccauaaautt

SEQ ID NO: 932 - DNA, 21 bp, Artificial Sequence
  source: /note="Description of Artificial Sequence: Synthetic oligonucleotide"
  source: /note="Description of Combined DNA/RNA Molecule: Synthetic oligonucleotide"
uguguauuugccauaaauatt

SEQ ID NO: 933 - DNA, 21 bp, Artificial Sequence
  source: /note="Description of Artificial Sequence: Synthetic oligonucleotide"
  source: /note="Description of Combined DNA/RNA Molecule: Synthetic oligonucleotide"
guguauuugccauaaauaatt

SEQ ID NO: 934 - DNA, 21 bp, Artificial Sequence
  source: /note="Description of Artificial Sequence: Synthetic oligonucleotide"
  source: /note="Description of Combined DNA/RNA Molecule: Synthetic oligonucleotide"
uguauuugccauaaauaautt

SEQ ID NO: 935 - DNA, 21 bp, Artificial Sequence
  source: /note="Description of Artificial Sequence: Synthetic oligonucleotide"
  source: /note="Description of Combined DNA/RNA Molecule: Synthetic oligonucleotide"
guauuugccauaaauaauatt

SEQ ID NO: 936 - DNA, 21 bp, Artificial Sequence
  source: /note="Description of Artificial Sequence: Synthetic oligonucleotide"
  source: /note="Description of Combined DNA/RNA Molecule: Synthetic oligonucleotide"
uauuugccauaaauaauactt

SEQ ID NO: 937 - DNA, 21 bp, Artificial Sequence
  source: /note="Description of Artificial Sequence: Synthetic oligonucleotide"
  source: /note="Description of Combined DNA/RNA Molecule: Synthetic oligonucleotide"
auuugccauaaauaauacutt

SEQ ID NO: 938 - DNA, 21 bp, Artificial Sequence
  source: /note="Description of Artificial Sequence: Synthetic oligonucleotide"
  source: /note="Description of Combined DNA/RNA Molecule: Synthetic oligonucleotide"
uuugccauaaauaauacuatt

SEQ ID NO: 939 - DNA, 21 bp, Artificial Sequence
  source: /note="Description of Artificial Sequence: Synthetic oligonucleotide"
  source: /note="Description of Combined DNA/RNA Molecule: Synthetic oligonucleotide"
ugaagauauucaccauuautt

SEQ ID NO: 940 - DNA, 21 bp, Artificial Sequence
  source: /note="Description of Artificial Sequence: Synthetic oligonucleotide"
  source: /note="Description of Combined DNA/RNA Molecule: Synthetic oligonucleotide"
gaagauauucaccauuauatt

SEQ ID NO: 941 - DNA, 21 bp, Artificial Sequence
  source: /note="Description of Artificial Sequence: Synthetic oligonucleotide"
  source: /note="Description of Combined DNA/RNA Molecule: Synthetic oligonucleotide"
agauauucaccauuauagatt

SEQ ID NO: 942 - DNA, 21 bp, Artificial Sequence
  source: /note="Description of Artificial Sequence: Synthetic oligonucleotide"
  source: /note="Description of Combined DNA/RNA Molecule: Synthetic oligonucleotide"
aaacaucagcaaagacaagtt

SEQ ID NO: 943 - DNA, 21 bp, Artificial Sequence
  source: /note="Description of Artificial Sequence: Synthetic oligonucleotide"
  source: /note="Description of Combined DNA/RNA Molecule: Synthetic oligonucleotide"
aacaucagcaaagacaagatt

SEQ ID NO: 944 - DNA, 21 bp, Artificial Sequence
  source: /note="Description of Artificial Sequence: Synthetic oligonucleotide"
  source: /note="Description of Combined DNA/RNA Molecule: Synthetic oligonucleotide"
acaucagcaaagacaagactt

SEQ ID NO: 945 - DNA, 21 bp, Artificial Sequence
  source: /note="Description of Artificial Sequence: Synthetic oligonucleotide"
  source: /note="Description of Combined DNA/RNA Molecule: Synthetic oligonucleotide"
caucagcaaagacaagacatt

SEQ ID NO: 946 - DNA, 21 bp, Artificial Sequence
  source: /note="Description of Artificial Sequence: Synthetic oligonucleotide"
  source: /note="Description of Combined DNA/RNA Molecule: Synthetic oligonucleotide"
aucagcaaagacaagacagtt

SEQ ID NO: 947 - DNA, 21 bp, Artificial Sequence
  source: /note="Description of Artificial Sequence: Synthetic oligonucleotide"
  source: /note="Description of Combined DNA/RNA Molecule: Synthetic oligonucleotide"
gauauucucgacacagcagtt

SEQ ID NO: 948 - DNA, 21 bp, Artificial Sequence
  source: /note="Description of Artificial Sequence: Synthetic oligonucleotide"
  source: /note="Description of Combined DNA/RNA Molecule: Synthetic oligonucleotide"
uucaccauuauagagaacatt

SEQ ID NO: 949 - DNA, 21 bp, Artificial Sequence
  source: /note="Description of Artificial Sequence: Synthetic oligonucleotide"
  source: /note="Description of Combined DNA/RNA Molecule: Synthetic oligonucleotide"
uauucucgacacagcaggutt

SEQ ID NO: 950 - DNA, 21 bp, Artificial Sequence
  source: /note="Description of Artificial Sequence: Synthetic oligonucleotide"
  source: /note="Description of Combined DNA/RNA Molecule: Synthetic oligonucleotide"
uucucgacacagcaggucatt

SEQ ID NO: 951 - DNA, 21 bp, Artificial Sequence
  source: /note="Description of Artificial Sequence: Synthetic oligonucleotide"
  source: /note="Description of Combined DNA/RNA Molecule: Synthetic oligonucleotide"
aagauauucaccauuauagtt

SEQ ID NO: 952 - DNA, 21 bp, Artificial Sequence
  source: /note="Description of Artificial Sequence: Synthetic oligonucleotide"
  source: /note="Description of Combined DNA/RNA Molecule: Synthetic oligonucleotide"
gauauucaccauuauagagtt

SEQ ID NO: 953 - DNA, 21 bp, Artificial Sequence
  source: /note="Description of Artificial Sequence: Synthetic oligonucleotide"
  source: /note="Description of Combined DNA/RNA Molecule: Synthetic oligonucleotide"
auauucaccauuauagagatt

SEQ ID NO: 954 - DNA, 21 bp, Artificial Sequence
  source: /note="Description of Artificial Sequence: Synthetic oligonucleotide"
  source: /note="Description of Combined DNA/RNA Molecule: Synthetic oligonucleotide"
uauucaccauuauagagaatt

SEQ ID NO: 955 - DNA, 21 bp, Artificial Sequence
  source: /note="Description of Artificial Sequence: Synthetic oligonucleotide"
  source: /note="Description of Combined DNA/RNA Molecule: Synthetic oligonucleotide"
auucaccauuauagagaactt

SEQ ID NO: 956 - DNA, 21 bp, Artificial Sequence
  source: /note="Description of Artificial Sequence: Synthetic oligonucleotide"
  source: /note="Description of Combined DNA/RNA Molecule: Synthetic oligonucleotide"
ucaccauuauagagaacaatt

SEQ ID NO: 957 - DNA, 21 bp, Artificial Sequence
  source: /note="Description of Artificial Sequence: Synthetic oligonucleotide"
  source: /note="Description of Combined DNA/RNA Molecule: Synthetic oligonucleotide"
caccauuauagagaacaaatt

SEQ ID NO: 958 - DNA, 21 bp, Artificial Sequence
  source: /note="Description of Artificial Sequence: Synthetic oligonucleotide"
  source: /note="Description of Combined DNA/RNA Molecule: Synthetic oligonucleotide"
accauuauagagaacaaautt

SEQ ID NO: 959 - DNA, 21 bp, Artificial Sequence
  source: /note="Description of Artificial Sequence: Synthetic oligonucleotide"
  source: /note="Description of Combined DNA/RNA Molecule: Synthetic oligonucleotide"
ccauuauagagaacaaauutt

SEQ ID NO: 960 - DNA, 21 bp, Artificial Sequence
  source: /note="Description of Artificial Sequence: Synthetic oligonucleotide"
  source: /note="Description of Combined DNA/RNA Molecule: Synthetic oligonucleotide"
cauuauagagaacaaauuatt

SEQ ID NO: 961 - DNA, 21 bp, Artificial Sequence
  source: /note="Description of Artificial Sequence: Synthetic oligonucleotide"
  source: /note="Description of Combined DNA/RNA Molecule: Synthetic oligonucleotide"
auuauagagaacaaauuaatt

SEQ ID NO: 962 - DNA, 21 bp, Artificial Sequence
  source: /note="Description of Artificial Sequence: Synthetic oligonucleotide"
  source: /note="Description of Combined DNA/RNA Molecule: Synthetic oligonucleotide"
uuauagagaacaaauuaaatt

SEQ ID NO: 963 - DNA, 21 bp, Artificial Sequence
  source: /note="Description of Artificial Sequence: Synthetic oligonucleotide"
  source: /note="Description of Combined DNA/RNA Molecule: Synthetic oligonucleotide"
uauagagaacaaauuaaaatt

SEQ ID NO: 964 - DNA, 21 bp, Artificial Sequence
  source: /note="Description of Artificial Sequence: Synthetic oligonucleotide"
  source: /note="Description of Combined DNA/RNA Molecule: Synthetic oligonucleotide"
auagagaacaaauuaaaagtt

SEQ ID NO: 965 - DNA, 21 bp, Artificial Sequence
  source: /note="Description of Artificial Sequence: Synthetic oligonucleotide"
  source: /note="Description of Combined DNA/RNA Molecule: Synthetic oligonucleotide"
uagagaacaaauuaaaagatt

SEQ ID NO: 966 - DNA, 21 bp, Artificial Sequence
  source: /note="Description of Artificial Sequence: Synthetic oligonucleotide"
  source: /note="Description of Combined DNA/RNA Molecule: Synthetic oligonucleotide"
agagaacaaauuaaaagagtt

SEQ ID NO: 967 - DNA, 21 bp, Artificial Sequence
  source: /note="Description of Artificial Sequence: Synthetic oligonucleotide"
  source: /note="Description of Combined DNA/RNA Molecule: Synthetic oligonucleotide"
gaagauguaccuauggucctt

SEQ ID NO: 968 - DNA, 21 bp, Artificial Sequence
  source: /note="Description of Artificial Sequence: Synthetic oligonucleotide"
  source: /note="Description of Combined DNA/RNA Molecule: Synthetic oligonucleotide"
aagauguaccuaugguccutt

SEQ ID NO: 969 - DNA, 21 bp, Artificial Sequence
  source: /note="Description of Artificial Sequence: Synthetic oligonucleotide"
  source: /note="Description of Combined DNA/RNA Molecule: Synthetic oligonucleotide"
agauguaccuaugguccuatt

SEQ ID NO: 970 - DNA, 21 bp, Artificial Sequence
  source: /note="Description of Artificial Sequence: Synthetic oligonucleotide"
  source: /note="Description of Combined DNA/RNA Molecule: Synthetic oligonucleotide"
gauguaccuaugguccuagtt

SEQ ID NO: 971 - DNA, 21 bp, Artificial Sequence
  source: /note="Description of Artificial Sequence: Synthetic oligonucleotide"
  source: /note="Description of Combined DNA/RNA Molecule: Synthetic oligonucleotide"
auguaccuaugguccuagutt

SEQ ID NO: 972 - DNA, 21 bp, Artificial Sequence
  source: /note="Description of Artificial Sequence: Synthetic oligonucleotide"
  source: /note="Description of Combined DNA/RNA Molecule: Synthetic oligonucleotide"
uguaccuaugguccuaguatt

SEQ ID NO: 973 - DNA, 21 bp, Artificial Sequence
  source: /note="Description of Artificial Sequence: Synthetic oligonucleotide"
  source: /note="Description of Combined DNA/RNA Molecule: Synthetic oligonucleotide"
guaccuaugguccuaguagtt

SEQ ID NO: 974 - DNA, 21 bp, Artificial Sequence
  source: /note="Description of Artificial Sequence: Synthetic oligonucleotide"
  source: /note="Description of Combined DNA/RNA Molecule: Synthetic oligonucleotide"
uaccuaugguccuaguaggtt

SEQ ID NO: 975 - DNA, 21 bp, Artificial Sequence
  source: /note="Description of Artificial Sequence: Synthetic oligonucleotide"
  source: /note="Description of Combined DNA/RNA Molecule: Synthetic oligonucleotide"
accuaugguccuaguaggatt

SEQ ID NO: 976 - DNA, 21 bp, Artificial Sequence
  source: /note="Description of Artificial Sequence: Synthetic oligonucleotide"
  source: /note="Description of Combined DNA/RNA Molecule: Synthetic oligonucleotide"
ccuaugguccuaguaggaatt

SEQ ID NO: 977 - DNA, 21 bp, Artificial Sequence
  source: /note="Description of Artificial Sequence: Synthetic oligonucleotide"
  source: /note="Description of Combined DNA/RNA Molecule: Synthetic oligonucleotide"
cuaugguccuaguaggaaatt

SEQ ID NO: 978 - DNA, 21 bp, Artificial Sequence
  source: /note="Description of Artificial Sequence: Synthetic oligonucleotide"
  source: /note="Description of Combined DNA/RNA Molecule: Synthetic oligonucleotide"
uaugguccuaguaggaaautt

SEQ ID NO: 979 - DNA, 21 bp, Artificial Sequence
  source: /note="Description of Artificial Sequence: Synthetic oligonucleotide"
  source: /note="Description of Combined DNA/RNA Molecule: Synthetic oligonucleotide"
augguccuaguaggaaauatt

SEQ ID NO: 980 - DNA, 21 bp, Artificial Sequence
  source: /note="Description of Artificial Sequence: Synthetic oligonucleotide"
  source: /note="Description of Combined DNA/RNA Molecule: Synthetic oligonucleotide"
ugguccuaguaggaaauaatt

SEQ ID NO: 981 - DNA, 21 bp, Artificial Sequence
  source: /note="Description of Artificial Sequence: Synthetic oligonucleotide"
  source: /note="Description of Combined DNA/RNA Molecule: Synthetic oligonucleotide"
gguccuaguaggaaauaaatt

SEQ ID NO: 982 - DNA, 21 bp, Artificial Sequence
  source: /note="Description of Artificial Sequence: Synthetic oligonucleotide"
  source: /note="Description of Combined DNA/RNA Molecule: Synthetic oligonucleotide"
guccuaguaggaaauaaautt

SEQ ID NO: 983 - DNA, 21 bp, Artificial Sequence
  source: /note="Description of Artificial Sequence: Synthetic oligonucleotide"
  source: /note="Description of Combined DNA/RNA Molecule: Synthetic oligonucleotide"
uccuaguaggaaauaaaugtt

SEQ ID NO: 984 - DNA, 21 bp, Artificial Sequence
  source: /note="Description of Artificial Sequence: Synthetic oligonucleotide"
  source: /note="Description of Combined DNA/RNA Molecule: Synthetic oligonucleotide"
ccuaguaggaaauaaaugutt

SEQ ID NO: 985 - DNA, 21 bp, Artificial Sequence
  source: /note="Description of Artificial Sequence: Synthetic oligonucleotide"
  source: /note="Description of Combined DNA/RNA Molecule: Synthetic oligonucleotide"
cuaguaggaaauaaaugugtt

SEQ ID NO: 986 - DNA, 21 bp, Artificial Sequence
  source: /note="Description of Artificial Sequence: Synthetic oligonucleotide"
  source: /note="Description of Combined DNA/RNA Molecule: Synthetic oligonucleotide"
uaguaggaaauaaaugugatt

SEQ ID NO: 987 - DNA, 21 bp, Artificial Sequence
  source: /note="Description of Artificial Sequence: Synthetic oligonucleotide"
  source: /note="Description of Combined DNA/RNA Molecule: Synthetic oligonucleotide"
aguaggaaauaaaugugautt

SEQ ID NO: 988 - DNA, 21 bp, Artificial Sequence
  source: /note="Description of Artificial Sequence: Synthetic oligonucleotide"
  source: /note="Description of Combined DNA/RNA Molecule: Synthetic oligonucleotide"
ggaauuccuuuuauugaaatt

SEQ ID NO: 989 - DNA, 21 bp, Artificial Sequence
  source: /note="Description of Artificial Sequence: Synthetic oligonucleotide"
  source: /note="Description of Combined DNA/RNA Molecule: Synthetic oligonucleotide"
gaauuccuuuuauugaaactt

SEQ ID NO: 990 - DNA, 21 bp, Artificial Sequence
  source: /note="Description of Artificial Sequence: Synthetic oligonucleotide"
  source: /note="Description of Combined DNA/RNA Molecule: Synthetic oligonucleotide"
aauuccuuuuauugaaacatt

SEQ ID NO: 991 - DNA, 21 bp, Artificial Sequence
  source: /note="Description of Artificial Sequence: Synthetic oligonucleotide"
  source: /note="Description of Combined DNA/RNA Molecule: Synthetic oligonucleotide"
auuccuuuuauugaaacautt

SEQ ID NO: 992 - DNA, 21 bp, Artificial Sequence
  source: /note="Description of Artificial Sequence: Synthetic oligonucleotide"
  source: /note="Description of Combined DNA/RNA Molecule: Synthetic oligonucleotide"
uuccuuuuauugaaacauctt

SEQ ID NO: 993 - DNA, 21 bp, Artificial Sequence
  source: /note="Description of Artificial Sequence: Synthetic oligonucleotide"
  source: /note="Description of Combined DNA/RNA Molecule: Synthetic oligonucleotide"
uccuuuuauugaaacaucatt

SEQ ID NO: 994 - DNA, 21 bp, Artificial Sequence
  source: /note="Description of Artificial Sequence: Synthetic oligonucleotide"
  source: /note="Description of Combined DNA/RNA Molecule: Synthetic oligonucleotide"
ccuuuuauugaaacaucagtt

SEQ ID NO: 995 - DNA, 21 bp, Artificial Sequence
  source: /note="Description of Artificial Sequence: Synthetic oligonucleotide"
  source: /note="Description of Combined DNA/RNA Molecule: Synthetic oligonucleotide"
cuuuuauugaaacaucagctt

SEQ ID NO: 996 - DNA, 21 bp, Artificial Sequence
  source: /note="Description of Artificial Sequence: Synthetic oligonucleotide"
  source: /note="Description of Combined DNA/RNA Molecule: Synthetic oligonucleotide"
uuuuauugaaacaucagcatt

SEQ ID NO: 997 - DNA, 21 bp, Artificial Sequence
  source: /note="Description of Artificial Sequence: Synthetic oligonucleotide"
  source: /note="Description of Combined DNA/RNA Molecule: Synthetic oligonucleotide"
uuuauugaaacaucagcaatt

SEQ ID NO: 998 - DNA, 21 bp, Artificial Sequence
  source: /note="Description of Artificial Sequence: Synthetic oligonucleotide"
  source: /note="Description of Combined DNA/RNA Molecule: Synthetic oligonucleotide"
uuauugaaacaucagcaaatt

SEQ ID NO: 999 - DNA, 21 bp, Artificial Sequence
  source: /note="Description of Artificial Sequence: Synthetic oligonucleotide"
  source: /note="Description of Combined DNA/RNA Molecule: Synthetic oligonucleotide"
uauugaaacaucagcaaagtt

SEQ ID NO: 1000 - DNA, 21 bp, Artificial Sequence
  source: /note="Description of Artificial Sequence: Synthetic oligonucleotide"
  source: /note="Description of Combined DNA/RNA Molecule: Synthetic oligonucleotide"
auugaaacaucagcaaagatt

SEQ ID NO: 1001 - DNA, 21 bp, Artificial Sequence
  source: /note="Description of Artificial Sequence: Synthetic oligonucleotide"
  source: /note="Description of Combined DNA/RNA Molecule: Synthetic oligonucleotide"
uugaaacaucagcaaagactt

SEQ ID NO: 1002 - DNA, 21 bp, Artificial Sequence
  source: /note="Description of Artificial Sequence: Synthetic oligonucleotide"
  source: /note="Description of Combined DNA/RNA Molecule: Synthetic oligonucleotide"
ugaaacaucagcaaagacatt

SEQ ID NO: 1003 - DNA, 21 bp, Artificial Sequence
  source: /note="Description of Artificial Sequence: Synthetic oligonucleotide"
  source: /note="Description of Combined DNA/RNA Molecule: Synthetic oligonucleotide"
gaaacaucagcaaagacaatt

SEQ ID NO: 1004 - DNA, 21 bp, Artificial Sequence
  source: /note="Description of Artificial Sequence: Synthetic oligonucleotide"
  source: /note="Description of Combined DNA/RNA Molecule: Synthetic oligonucleotide"
augacugaauauaaacuugtt

SEQ ID NO: 1005 - DNA, 21 bp, Artificial Sequence
  source: /note="Description of Artificial Sequence: Synthetic oligonucleotide"
  source: /note="Description of Combined DNA/RNA Molecule: Synthetic oligonucleotide"
ugacugaauauaaacuugutt

SEQ ID NO: 1006 - DNA, 21 bp, Artificial Sequence
  source: /note="Description of Artificial Sequence: Synthetic oligonucleotide"
  source: /note="Description of Combined DNA/RNA Molecule: Synthetic oligonucleotide"
gacugaauauaaacuugugtt

SEQ ID NO: 1007 - DNA, 21 bp, Artificial Sequence
  source: /note="Description of Artificial Sequence: Synthetic oligonucleotide"
  source: /note="Description of Combined DNA/RNA Molecule: Synthetic oligonucleotide"
acugaauauaaacuuguggtt

SEQ ID NO: 1008 - DNA, 21 bp, Artificial Sequence
  source: /note="Description of Artificial Sequence: Synthetic oligonucleotide"
  source: /note="Description of Combined DNA/RNA Molecule: Synthetic oligonucleotide"
cugaauauaaacuuguggutt

SEQ ID NO: 1009 - DNA, 21 bp, Artificial Sequence
  source: /note="Description of Artificial Sequence: Synthetic oligonucleotide"
  source: /note="Description of Combined DNA/RNA Molecule: Synthetic oligonucleotide"
ugaauauaaacuugugguatt

SEQ ID NO: 1010 - DNA, 21 bp, Artificial Sequence
  source: /note="Description of Artificial Sequence: Synthetic oligonucleotide"
  source: /note="Description of Combined DNA/RNA Molecule: Synthetic oligonucleotide"
gaauauaaacuugugguagtt

SEQ ID NO: 1011 - DNA, 21 bp, Artificial Sequence
  source: /note="Description of Artificial Sequence: Synthetic oligonucleotide"
  source: /note="Description of Combined DNA/RNA Molecule: Synthetic oligonucleotide"
aauauaaacuugugguagutt

SEQ ID NO: 1012 - DNA, 21 bp, Artificial Sequence
  source: /note="Description of Artificial Sequence: Synthetic oligonucleotide"
  source: /note="Description of Combined DNA/RNA Molecule: Synthetic oligonucleotide"
auauaaacuugugguaguutt

SEQ ID NO: 1013 - DNA, 21 bp, Artificial Sequence
  source: /note="Description of Artificial Sequence: Synthetic oligonucleotide"
  source: /note="Description of Combined DNA/RNA Molecule: Synthetic oligonucleotide"
uauaaacuugugguaguugtt

SEQ ID NO: 1014 - DNA, 21 bp, Artificial Sequence
  source: /note="Description of Artificial Sequence: Synthetic oligonucleotide"
  source: /note="Description of Combined DNA/RNA Molecule: Synthetic oligonucleotide"
auaaacuugugguaguuggtt

SEQ ID NO: 1015 - DNA, 21 bp, Artificial Sequence
  source: /note="Description of Artificial Sequence: Synthetic oligonucleotide"
  source: /note="Description of Combined DNA/RNA Molecule: Synthetic oligonucleotide"
uaaacuugugguaguuggatt

SEQ ID NO: 1016 - DNA, 21 bp, Artificial Sequence
  source: /note="Description of Artificial Sequence: Synthetic oligonucleotide"
  source: /note="Description of Combined DNA/RNA Molecule: Synthetic oligonucleotide"
aaacuugugguaguuggagtt

SEQ ID NO: 1017 - DNA, 21 bp, Artificial Sequence
  source: /note="Description of Artificial Sequence: Synthetic oligonucleotide"
  source: /note="Description of Combined DNA/RNA Molecule: Synthetic oligonucleotide"
aacuugugguaguuggagctt

SEQ ID NO: 1018 - DNA, 21 bp, Artificial Sequence
  source: /note="Description of Artificial Sequence: Synthetic oligonucleotide"
  source: /note="Description of Combined DNA/RNA Molecule: Synthetic oligonucleotide"
acuugugguaguuggagcutt

SEQ ID NO: 1019 - DNA, 21 bp, Artificial Sequence
  source: /note="Description of Artificial Sequence: Synthetic oligonucleotide"
  source: /note="Description of Combined DNA/RNA Molecule: Synthetic oligonucleotide"
cuugugguaguuggagcugtt

SEQ ID NO: 1020 - DNA, 21 bp, Artificial Sequence
  source: /note="Description of Artificial Sequence: Synthetic oligonucleotide"
  source: /note="Description of Combined DNA/RNA Molecule: Synthetic oligonucleotide"
uugugguaguuggagcuggtt

SEQ ID NO: 1021 - DNA, 21 bp, Artificial Sequence
  source: /note="Description of Artificial Sequence: Synthetic oligonucleotide"
  source: /note="Description of Combined DNA/RNA Molecule: Synthetic oligonucleotide"
ugugguaguuggagcuggutt

SEQ ID NO: 1022 - DNA, 21 bp, Artificial Sequence
  source: /note="Description of Artificial Sequence: Synthetic oligonucleotide"
  source: /note="Description of Combined DNA/RNA Molecule: Synthetic oligonucleotide"
gugguaguuggagcuggugtt

SEQ ID NO: 1023 - DNA, 21 bp, Artificial Sequence
  source: /note="Description of Artificial Sequence: Synthetic oligonucleotide"
  source: /note="Description of Combined DNA/RNA Molecule: Synthetic oligonucleotide"
ugguaguuggagcugguggtt

SEQ ID NO: 1024 - DNA, 21 bp, Artificial Sequence
  source: /note="Description of Artificial Sequence: Synthetic oligonucleotide"
  source: /note="Description of Combined DNA/RNA Molecule: Synthetic oligonucleotide"
gguaguuggagcugguggctt

SEQ ID NO: 1025 - DNA, 21 bp, Artificial Sequence
  source: /note="Description of Artificial Sequence: Synthetic oligonucleotide"
  source: /note="Description of Combined DNA/RNA Molecule: Synthetic oligonucleotide"
guaguuggagcugguggcgtt

SEQ ID NO: 1026 - DNA, 21 bp, Artificial Sequence
  source: /note="Description of Artificial Sequence: Synthetic oligonucleotide"
  source: /note="Description of Combined DNA/RNA Molecule: Synthetic oligonucleotide"
uaguuggagcugguggcgutt

SEQ ID NO: 1027 - DNA, 21 bp, Artificial Sequence
  source: /note="Description of Artificial Sequence: Synthetic oligonucleotide"
  source: /note="Description of Combined DNA/RNA Molecule: Synthetic oligonucleotide"
aguuggagcugguggcguatt

SEQ ID NO: 1028 - DNA, 21 bp, Artificial Sequence
  source: /note="Description of Artificial Sequence: Synthetic oligonucleotide"
  source: /note="Description of Combined DNA/RNA Molecule: Synthetic oligonucleotide"
guuggagcugguggcguagtt

SEQ ID NO: 1029 - DNA, 21 bp, Artificial Sequence
  source: /note="Description of Artificial Sequence: Synthetic oligonucleotide"
  source: /note="Description of Combined DNA/RNA Molecule: Synthetic oligonucleotide"
uuggagcugguggcguaggtt

SEQ ID NO: 1030 - DNA, 21 bp, Artificial Sequence
  source: /note="Description of Artificial Sequence: Synthetic oligonucleotide"
  source: /note="Description of Combined DNA/RNA Molecule: Synthetic oligonucleotide"
uggagcugguggcguaggctt

SEQ ID NO: 1031 - DNA, 21 bp, Artificial Sequence
  source: /note="Description of Artificial Sequence: Synthetic oligonucleotide"
  source: /note="Description of Combined DNA/RNA Molecule: Synthetic oligonucleotide"
ggagcugguggcguaggcatt

SEQ ID NO: 1032 - DNA, 21 bp, Artificial Sequence
  source: /note="Description of Artificial Sequence: Synthetic oligonucleotide"
  source: /note="Description of Combined DNA/RNA Molecule: Synthetic oligonucleotide"
gagcugguggcguaggcaatt

SEQ ID NO: 1033 - DNA, 21 bp, Artificial Sequence
  source: /note="Description of Artificial Sequence: Synthetic oligonucleotide"
  source: /note="Description of Combined DNA/RNA Molecule: Synthetic oligonucleotide"
agcugguggcguaggcaagtt

SEQ ID NO: 1034 - DNA, 21 bp, Artificial Sequence
  source: /note="Description of Artificial Sequence: Synthetic oligonucleotide"
  source: /note="Description of Combined DNA/RNA Molecule: Synthetic oligonucleotide"
gcugguggcguaggcaagatt

SEQ ID NO: 1035 - DNA, 21 bp, Artificial Sequence
  source: /note="Description of Artificial Sequence: Synthetic oligonucleotide"
  source: /note="Description of Combined DNA/RNA Molecule: Synthetic oligonucleotide"
cugguggcguaggcaagagtt

SEQ ID NO: 1036 - DNA, 21 bp, Artificial Sequence
  source: /note="Description of Artificial Sequence: Synthetic oligonucleotide"
  source: /note="Description of Combined DNA/RNA Molecule: Synthetic oligonucleotide"
ugguggcguaggcaagagutt

SEQ ID NO: 1037 - DNA, 21 bp, Artificial Sequence
  source: /note="Description of Artificial Sequence: Synthetic oligonucleotide"
  source: /note="Description of Combined DNA/RNA Molecule: Synthetic oligonucleotide"
gguggcguaggcaagagugtt

SEQ ID NO: 1038 - DNA, 21 bp, Artificial Sequence
  source: /note="Description of Artificial Sequence: Synthetic oligonucleotide"
  source: /note="Description of Combined DNA/RNA Molecule: Synthetic oligonucleotide"
guggcguaggcaagagugctt

SEQ ID NO: 1039 - DNA, 21 bp, Artificial Sequence
  source: /note="Description of Artificial Sequence: Synthetic oligonucleotide"
  source: /note="Description of Combined DNA/RNA Molecule: Synthetic oligonucleotide"
uggcguaggcaagagugcctt

SEQ ID NO: 1040 - DNA, 21 bp, Artificial Sequence
  source: /note="Description of Artificial Sequence: Synthetic oligonucleotide"
  source: /note="Description of Combined DNA/RNA Molecule: Synthetic oligonucleotide"
ggcguaggcaagagugccutt

SEQ ID NO: 1041 - DNA, 21 bp, Artificial Sequence
  source: /note="Description of Artificial Sequence: Synthetic oligonucleotide"
  source: /note="Description of Combined DNA/RNA Molecule: Synthetic oligonucleotide"
gcguaggcaagagugccuutt

SEQ ID NO: 1042 - DNA, 21 bp, Artificial Sequence
  source: /note="Description of Artificial Sequence: Synthetic oligonucleotide"
  source: /note="Description of Combined DNA/RNA Molecule: Synthetic oligonucleotide"
cguaggcaagagugccuugtt

SEQ ID NO: 1043 - DNA, 21 bp, Artificial Sequence
  source: /note="Description of Artificial Sequence: Synthetic oligonucleotide"
  source: /note="Description of Combined DNA/RNA Molecule: Synthetic oligonucleotide"
guaggcaagagugccuugatt

SEQ ID NO: 1044 - DNA, 21 bp, Artificial Sequence
  source: /note="Description of Artificial Sequence: Synthetic oligonucleotide"
  source: /note="Description of Combined DNA/RNA Molecule: Synthetic oligonucleotide"
uaggcaagagugccuugactt

SEQ ID NO: 1045 - DNA, 21 bp, Artificial Sequence
  source: /note="Description of Artificial Sequence: Synthetic oligonucleotide"
  source: /note="Description of Combined DNA/RNA Molecule: Synthetic oligonucleotide"
aggcaagagugccuugacgtt

SEQ ID NO: 1046 - DNA, 21 bp, Artificial Sequence
  source: /note="Description of Artificial Sequence: Synthetic oligonucleotide"
  source: /note="Description of Combined DNA/RNA Molecule: Synthetic oligonucleotide"
ggcaagagugccuugacgatt

SEQ ID NO: 1047 - DNA, 21 bp, Artificial Sequence
  source: /note="Description of Artificial Sequence: Synthetic oligonucleotide"
  source: /note="Description of Combined DNA/RNA Molecule: Synthetic oligonucleotide"
gcaagagugccuugacgautt

SEQ ID NO: 1048 - DNA, 21 bp, Artificial Sequence
  source: /note="Description of Artificial Sequence: Synthetic oligonucleotide"
  source: /note="Description of Combined DNA/RNA Molecule: Synthetic oligonucleotide"
caagagugccuugacgauatt

SEQ ID NO: 1049 - DNA, 21 bp, Artificial Sequence
  source: /note="Description of Artificial Sequence: Synthetic oligonucleotide"
  source: /note="Description of Combined DNA/RNA Molecule: Synthetic oligonucleotide"
aagagugccuugacgauactt

SEQ ID NO: 1050 - DNA, 21 bp, Artificial Sequence
  source: /note="Description of Artificial Sequence: Synthetic oligonucleotide"
  source: /note="Description of Combined DNA/RNA Molecule: Synthetic oligonucleotide"
agagugccuugacgauacatt

SEQ ID NO: 1051 - DNA, 21 bp, Artificial Sequence
  source: /note="Description of Artificial Sequence: Synthetic oligonucleotide"
  source: /note="Description of Combined DNA/RNA Molecule: Synthetic oligonucleotide"
gagugccuugacgauacagtt

SEQ ID NO: 1052 - DNA, 21 bp, Artificial Sequence
  source: /note="Description of Artificial Sequence: Synthetic oligonucleotide"
  source: /note="Description of Combined DNA/RNA Molecule: Synthetic oligonucleotide"
agugccuugacgauacagctt

SEQ ID NO: 1053 - DNA, 21 bp, Artificial Sequence
  source: /note="Description of Artificial Sequence: Synthetic oligonucleotide"
  source: /note="Description of Combined DNA/RNA Molecule: Synthetic oligonucleotide"
gugccuugacgauacagcutt

SEQ ID NO: 1054 - DNA, 21 bp, Artificial Sequence
  source: /note="Description of Artificial Sequence: Synthetic oligonucleotide"
  source: /note="Description of Combined DNA/RNA Molecule: Synthetic oligonucleotide"
ugccuugacgauacagcuatt

SEQ ID NO: 1055 - DNA, 21 bp, Artificial Sequence
  source: /note="Description of Artificial Sequence: Synthetic oligonucleotide"
  source: /note="Description of Combined DNA/RNA Molecule: Synthetic oligonucleotide"
gccuugacgauacagcuaatt

SEQ ID NO: 1056 - DNA, 21 bp, Artificial Sequence
  source: /note="Description of Artificial Sequence: Synthetic oligonucleotide"
  source: /note="Description of Combined DNA/RNA Molecule: Synthetic oligonucleotide"
ccuugacgauacagcuaautt

SEQ ID NO: 1057 - DNA, 21 bp, Artificial Sequence
  source: /note="Description of Artificial Sequence: Synthetic oligonucleotide"
  source: /note="Description of Combined DNA/RNA Molecule: Synthetic oligonucleotide"
cuugacgauacagcuaauutt

SEQ ID NO: 1058 - DNA, 21 bp, Artificial Sequence
  source: /note="Description of Artificial Sequence: Synthetic oligonucleotide"
  source: /note="Description of Combined DNA/RNA Molecule: Synthetic oligonucleotide"
uugacgauacagcuaauuctt

SEQ ID NO: 1059 - DNA, 21 bp, Artificial Sequence
  source: /note="Description of Artificial Sequence: Synthetic oligonucleotide"
  source: /note="Description of Combined DNA/RNA Molecule: Synthetic oligonucleotide"
ugacgauacagcuaauucatt

SEQ ID NO: 1060 - DNA, 21 bp, Artificial Sequence
  source: /note="Description of Artificial Sequence: Synthetic oligonucleotide"
  source: /note="Description of Combined DNA/RNA Molecule: Synthetic oligonucleotide"
gacgauacagcuaauucagtt

SEQ ID NO: 1061 - DNA, 21 bp, Artificial Sequence
  source: /note="Description of Artificial Sequence: Synthetic oligonucleotide"
  source: /note="Description of Combined DNA/RNA Molecule: Synthetic oligonucleotide"
acgauacagcuaauucagatt

SEQ ID NO: 1062 - DNA, 21 bp, Artificial Sequence
  source: /note="Description of Artificial Sequence: Synthetic oligonucleotide"
  source: /note="Description of Combined DNA/RNA Molecule: Synthetic oligonucleotide"
cgauacagcuaauucagaatt

SEQ ID NO: 1063 - DNA, 21 bp, Artificial Sequence
  source: /note="Description of Artificial Sequence: Synthetic oligonucleotide"
  source: /note="Description of Combined DNA/RNA Molecule: Synthetic oligonucleotide"
gauacagcuaauucagaautt

SEQ ID NO: 1064 - DNA, 21 bp, Artificial Sequence
  source: /note="Description of Artificial Sequence: Synthetic oligonucleotide"
  source: /note="Description of Combined DNA/RNA Molecule: Synthetic oligonucleotide"
auacagcuaauucagaauctt

SEQ ID NO: 1065 - DNA, 21 bp, Artificial Sequence
  source: /note="Description of Artificial Sequence: Synthetic oligonucleotide"
  source: /note="Description of Combined DNA/RNA Molecule: Synthetic oligonucleotide"
uacagcuaauucagaaucatt

SEQ ID NO: 1066 - DNA, 21 bp, Artificial Sequence
  source: /note="Description of Artificial Sequence: Synthetic oligonucleotide"
  source: /note="Description of Combined DNA/RNA Molecule: Synthetic oligonucleotide"
acagcuaauucagaaucautt

SEQ ID NO: 1067 - DNA, 21 bp, Artificial Sequence
  source: /note="Description of Artificial Sequence: Synthetic oligonucleotide"
  source: /note="Description of Combined DNA/RNA Molecule: Synthetic oligonucleotide"
cagcuaauucagaaucauutt

SEQ ID NO: 1068 - DNA, 21 bp, Artificial Sequence
  source: /note="Description of Artificial Sequence: Synthetic oligonucleotide"
  source: /note="Description of Combined DNA/RNA Molecule: Synthetic oligonucleotide"
agcuaauucagaaucauuutt

SEQ ID NO: 1069 - DNA, 21 bp, Artificial Sequence
  source: /note="Description of Artificial Sequence: Synthetic oligonucleotide"
  source: /note="Description of Combined DNA/RNA Molecule: Synthetic oligonucleotide"
gcuaauucagaaucauuuutt

SEQ ID NO: 1070 - DNA, 21 bp, Artificial Sequence
  source: /note="Description of Artificial Sequence: Synthetic oligonucleotide"
  source: /note="Description of Combined DNA/RNA Molecule: Synthetic oligonucleotide"
cuaauucagaaucauuuugtt

SEQ ID NO: 1071 - DNA, 21 bp, Artificial Sequence
  source: /note="Description of Artificial Sequence: Synthetic oligonucleotide"
  source: /note="Description of Combined DNA/RNA Molecule: Synthetic oligonucleotide"
uaauucagaaucauuuugutt

SEQ ID NO: 1072 - DNA, 21 bp, Artificial Sequence
  source: /note="Description of Artificial Sequence: Synthetic oligonucleotide"
  source: /note="Description of Combined DNA/RNA Molecule: Synthetic oligonucleotide"
aauucagaaucauuuugugtt

SEQ ID NO: 1073 - DNA, 21 bp, Artificial Sequence
  source: /note="Description of Artificial Sequence: Synthetic oligonucleotide"
  source: /note="Description of Combined DNA/RNA Molecule: Synthetic oligonucleotide"
auucagaaucauuuuguggtt

SEQ ID NO: 1074 - DNA, 21 bp, Artificial Sequence
  source: /note="Description of Artificial Sequence: Synthetic oligonucleotide"
  source: /note="Description of Combined DNA/RNA Molecule: Synthetic oligonucleotide"
uucagaaucauuuuguggatt

SEQ ID NO: 1075 - DNA, 21 bp, Artificial Sequence
  source: /note="Description of Artificial Sequence: Synthetic oligonucleotide"
  source: /note="Description of Combined DNA/RNA Molecule: Synthetic oligonucleotide"
ucagaaucauuuuguggactt

SEQ ID NO: 1076 - DNA, 21 bp, Artificial Sequence
  source: /note="Description of Artificial Sequence: Synthetic oligonucleotide"
  source: /note="Description of Combined DNA/RNA Molecule: Synthetic oligonucleotide"
cagaaucauuuuguggacgtt

SEQ ID NO: 1077 - DNA, 21 bp, Artificial Sequence
  source: /note="Description of Artificial Sequence: Synthetic oligonucleotide"
  source: /note="Description of Combined DNA/RNA Molecule: Synthetic oligonucleotide"
agaaucauuuuguggacgatt

SEQ ID NO: 1078 - DNA, 21 bp, Artificial Sequence
  source: /note="Description of Artificial Sequence: Synthetic oligonucleotide"
  source: /note="Description of Combined DNA/RNA Molecule: Synthetic oligonucleotide"
gaaucauuuuguggacgaatt

SEQ ID NO: 1079 - DNA, 21 bp, Artificial Sequence
  source: /note="Description of Artificial Sequence: Synthetic oligonucleotide"
  source: /note="Description of Combined DNA/RNA Molecule: Synthetic oligonucleotide"
aaucauuuuguggacgaautt

SEQ ID NO: 1080 - DNA, 21 bp, Artificial Sequence
  source: /note="Description of Artificial Sequence: Synthetic oligonucleotide"
  source: /note="Description of Combined DNA/RNA Molecule: Synthetic oligonucleotide"
aucauuuuguggacgaauatt

SEQ ID NO: 1081 - DNA, 21 bp, Artificial Sequence
  source: /note="Description of Artificial Sequence: Synthetic oligonucleotide"
  source: /note="Description of Combined DNA/RNA Molecule: Synthetic oligonucleotide"
ucauuuuguggacgaauautt

SEQ ID NO: 1082 - DNA, 21 bp, Artificial Sequence
  source: /note="Description of Artificial Sequence: Synthetic oligonucleotide"
  source: /note="Description of Combined DNA/RNA Molecule: Synthetic oligonucleotide"
cauuuuguggacgaauaugtt

SEQ ID NO: 1083 - DNA, 21 bp, Artificial Sequence
  source: /note="Description of Artificial Sequence: Synthetic oligonucleotide"
  source: /note="Description of Combined DNA/RNA Molecule: Synthetic oligonucleotide"
auuuuguggacgaauaugatt

SEQ ID NO: 1084 - DNA, 21 bp, Artificial Sequence
  source: /note="Description of Artificial Sequence: Synthetic oligonucleotide"
  source: /note="Description of Combined DNA/RNA Molecule: Synthetic oligonucleotide"
uuuuguggacgaauaugautt

SEQ ID NO: 1085 - DNA, 21 bp, Artificial Sequence
  source: /note="Description of Artificial Sequence: Synthetic oligonucleotide"
  source: /note="Description of Combined DNA/RNA Molecule: Synthetic oligonucleotide"
uuuguggacgaauaugauctt

SEQ ID NO: 1086 - DNA, 21 bp, Artificial Sequence
  source: /note="Description of Artificial Sequence: Synthetic oligonucleotide"
  source: /note="Description of Combined DNA/RNA Molecule: Synthetic oligonucleotide"
uuguggacgaauaugaucctt

SEQ ID NO: 1087 - DNA, 21 bp, Artificial Sequence
  source: /note="Description of Artificial Sequence: Synthetic oligonucleotide"
  source: /note="Description of Combined DNA/RNA Molecule: Synthetic oligonucleotide"
uguggacgaauaugauccatt

SEQ ID NO: 1088 - DNA, 21 bp, Artificial Sequence
  source: /note="Description of Artificial Sequence: Synthetic oligonucleotide"
  source: /note="Description of Combined DNA/RNA Molecule: Synthetic oligonucleotide"
guggacgaauaugauccaatt

SEQ ID NO: 1089 - DNA, 21 bp, Artificial Sequence
  source: /note="Description of Artificial Sequence: Synthetic oligonucleotide"
  source: /note="Description of Combined DNA/RNA Molecule: Synthetic oligonucleotide"
uggacgaauaugauccaactt

SEQ ID NO: 1090 - DNA, 21 bp, Artificial Sequence
  source: /note="Description of Artificial Sequence: Synthetic oligonucleotide"
  source: /note="Description of Combined DNA/RNA Molecule: Synthetic oligonucleotide"
aggaagcaaguaguaauugtt

SEQ ID NO: 1091 - DNA, 21 bp, Artificial Sequence
  source: /note="Description of Artificial Sequence: Synthetic oligonucleotide"
  source: /note="Description of Combined DNA/RNA Molecule: Synthetic oligonucleotide"
ggaagcaaguaguaauugatt

SEQ ID NO: 1092 - DNA, 21 bp, Artificial Sequence
  source: /note="Description of Artificial Sequence: Synthetic oligonucleotide"
  source: /note="Description of Combined DNA/RNA Molecule: Synthetic oligonucleotide"
gaagcaaguaguaauugautt

SEQ ID NO: 1093 - DNA, 21 bp, Artificial Sequence
  source: /note="Description of Artificial Sequence: Synthetic oligonucleotide"
  source: /note="Description of Combined DNA/RNA Molecule: Synthetic oligonucleotide"
aagcaaguaguaauugaugtt

SEQ ID NO: 1094 - DNA, 21 bp, Artificial Sequence
  source: /note="Description of Artificial Sequence: Synthetic oligonucleotide"
  source: /note="Description of Combined DNA/RNA Molecule: Synthetic oligonucleotide"
agcaaguaguaauugauggtt

SEQ ID NO: 1095 - DNA, 21 bp, Artificial Sequence
  source: /note="Description of Artificial Sequence: Synthetic oligonucleotide"
  source: /note="Description of Combined DNA/RNA Molecule: Synthetic oligonucleotide"
gcaaguaguaauugauggatt

SEQ ID NO: 1096 - DNA, 21 bp, Artificial Sequence
  source: /note="Description of Artificial Sequence: Synthetic oligonucleotide"
  source: /note="Description of Combined DNA/RNA Molecule: Synthetic oligonucleotide"
caaguaguaauugauggagtt

SEQ ID NO: 1097 - DNA, 21 bp, Artificial Sequence
  source: /note="Description of Artificial Sequence: Synthetic oligonucleotide"
  source: /note="Description of Combined DNA/RNA Molecule: Synthetic oligonucleotide"
aaguaguaauugauggagatt

SEQ ID NO: 1098 - DNA, 21 bp, Artificial Sequence
  source: /note="Description of Artificial Sequence: Synthetic oligonucleotide"
  source: /note="Description of Combined DNA/RNA Molecule: Synthetic oligonucleotide"
aguaguaauugauggagaatt

SEQ ID NO: 1099 - DNA, 21 bp, Artificial Sequence
  source: /note="Description of Artificial Sequence: Synthetic oligonucleotide"
  source: /note="Description of Combined DNA/RNA Molecule: Synthetic oligonucleotide"
guaguaauugauggagaaatt

SEQ ID NO: 1100 - DNA, 21 bp, Artificial Sequence
  source: /note="Description of Artificial Sequence: Synthetic oligonucleotide"
  source: /note="Description of Combined DNA/RNA Molecule: Synthetic oligonucleotide"
uaguaauugauggagaaactt

SEQ ID NO: 1101 - DNA, 21 bp, Artificial Sequence
  source: /note="Description of Artificial Sequence: Synthetic oligonucleotide"
  source: /note="Description of Combined DNA/RNA Molecule: Synthetic oligonucleotide"
aguaauugauggagaaacctt

SEQ ID NO: 1102 - DNA, 21 bp, Artificial Sequence
  source: /note="Description of Artificial Sequence: Synthetic oligonucleotide"
  source: /note="Description of Combined DNA/RNA Molecule: Synthetic oligonucleotide"
guaauugauggagaaaccutt

SEQ ID NO: 1103 - DNA, 21 bp, Artificial Sequence
  source: /note="Description of Artificial Sequence: Synthetic oligonucleotide"
  source: /note="Description of Combined DNA/RNA Molecule: Synthetic oligonucleotide"
uaauugauggagaaaccugtt

SEQ ID NO: 1104 - DNA, 21 bp, Artificial Sequence
  source: /note="Description of Artificial Sequence: Synthetic oligonucleotide"
  source: /note="Description of Combined DNA/RNA Molecule: Synthetic oligonucleotide"
aauugauggagaaaccugutt

SEQ ID NO: 1105 - DNA, 21 bp, Artificial Sequence
  source: /note="Description of Artificial Sequence: Synthetic oligonucleotide"
  source: /note="Description of Combined DNA/RNA Molecule: Synthetic oligonucleotide"
auugauggagaaaccuguctt

SEQ ID NO: 1106 - DNA, 21 bp, Artificial Sequence
  source: /note="Description of Artificial Sequence: Synthetic oligonucleotide"
  source: /note="Description of Combined DNA/RNA Molecule: Synthetic oligonucleotide"
uugauggagaaaccugucutt

SEQ ID NO: 1107 - DNA, 21 bp, Artificial Sequence
  source: /note="Description of Artificial Sequence: Synthetic oligonucleotide"
  source: /note="Description of Combined DNA/RNA Molecule: Synthetic oligonucleotide"
ugauggagaaaccugucuctt

SEQ ID NO: 1108 - DNA, 21 bp, Artificial Sequence
  source: /note="Description of Artificial Sequence: Synthetic oligonucleotide"
  source: /note="Description of Combined DNA/RNA Molecule: Synthetic oligonucleotide"
gauggagaaaccugucucutt

SEQ ID NO: 1109 - DNA, 21 bp, Artificial Sequence
  source: /note="Description of Artificial Sequence: Synthetic oligonucleotide"
  source: /note="Description of Combined DNA/RNA Molecule: Synthetic oligonucleotide"
auggagaaaccugucucuutt

SEQ ID NO: 1110 - DNA, 21 bp, Artificial Sequence
  source: /note="Description of Artificial Sequence: Synthetic oligonucleotide"
  source: /note="Description of Combined DNA/RNA Molecule: Synthetic oligonucleotide"
uggagaaaccugucucuugtt

SEQ ID NO: 1111 - DNA, 21 bp, Artificial Sequence
  source: /note="Description of Artificial Sequence: Synthetic oligonucleotide"
  source: /note="Description of Combined DNA/RNA Molecule: Synthetic oligonucleotide"
ggagaaaccugucucuuggtt

SEQ ID NO: 1112 - DNA, 21 bp, Artificial Sequence
  source: /note="Description of Artificial Sequence: Synthetic oligonucleotide"
  source: /note="Description of Combined DNA/RNA Molecule: Synthetic oligonucleotide"
gagaaaccugucucuuggatt

SEQ ID NO: 1113 - DNA, 21 bp, Artificial Sequence
  source: /note="Description of Artificial Sequence: Synthetic oligonucleotide"
  source: /note="Description of Combined DNA/RNA Molecule: Synthetic oligonucleotide"
agaaaccugucucuuggautt

SEQ ID NO: 1114 - DNA, 21 bp, Artificial Sequence
  source: /note="Description of Artificial Sequence: Synthetic oligonucleotide"
  source: /note="Description of Combined DNA/RNA Molecule: Synthetic oligonucleotide"
gaaaccugucucuuggauatt

SEQ ID NO: 1115 - DNA, 21 bp, Artificial Sequence
  source: /note="Description of Artificial Sequence: Synthetic oligonucleotide"
  source: /note="Description of Combined DNA/RNA Molecule: Synthetic oligonucleotide"
aaaccugucucuuggauautt

SEQ ID NO: 1116 - DNA, 21 bp, Artificial Sequence
  source: /note="Description of Artificial Sequence: Synthetic oligonucleotide"
  source: /note="Description of Combined DNA/RNA Molecule: Synthetic oligonucleotide"
aaccugucucuuggauauutt

SEQ ID NO: 1117 - DNA, 21 bp, Artificial Sequence
  source: /note="Description of Artificial Sequence: Synthetic oligonucleotide"
  source: /note="Description of Combined DNA/RNA Molecule: Synthetic oligonucleotide"
accugucucuuggauauuctt

SEQ ID NO: 1118 - DNA, 21 bp, Artificial Sequence
  source: /note="Description of Artificial Sequence: Synthetic oligonucleotide"
  source: /note="Description of Combined DNA/RNA Molecule: Synthetic oligonucleotide"
ccugucucuuggauauucutt

SEQ ID NO: 1119 - DNA, 21 bp, Artificial Sequence
  source: /note="Description of Artificial Sequence: Synthetic oligonucleotide"
  source: /note="Description of Combined DNA/RNA Molecule: Synthetic oligonucleotide"
cugucucuuggauauucuctt

SEQ ID NO: 1120 - DNA, 21 bp, Artificial Sequence
  source: /note="Description of Artificial Sequence: Synthetic oligonucleotide"
  source: /note="Description of Combined DNA/RNA Molecule: Synthetic oligonucleotide"
ugucucuuggauauucucgtt

SEQ ID NO: 1121 - DNA, 21 bp, Artificial Sequence
  source: /note="Description of Artificial Sequence: Synthetic oligonucleotide"
  source: /note="Description of Combined DNA/RNA Molecule: Synthetic oligonucleotide"
gucucuuggauauucucgatt

SEQ ID NO: 1122 - DNA, 21 bp, Artificial Sequence
  source: /note="Description of Artificial Sequence: Synthetic oligonucleotide"
  source: /note="Description of Combined DNA/RNA Molecule: Synthetic oligonucleotide"
ucucuuggauauucucgactt

SEQ ID NO: 1123 - DNA, 21 bp, Artificial Sequence
  source: /note="Description of Artificial Sequence: Synthetic oligonucleotide"
  source: /note="Description of Combined DNA/RNA Molecule: Synthetic oligonucleotide"
cucuuggauauucucgacatt

SEQ ID NO: 1124 - DNA, 21 bp, Artificial Sequence
  source: /note="Description of Artificial Sequence: Synthetic oligonucleotide"
  source: /note="Description of Combined DNA/RNA Molecule: Synthetic oligonucleotide"
ucuuggauauucucgacactt

SEQ ID NO: 1125 - DNA, 21 bp, Artificial Sequence
  source: /note="Description of Artificial Sequence: Synthetic oligonucleotide"
  source: /note="Description of Combined DNA/RNA Molecule: Synthetic oligonucleotide"
cuuggauauucucgacacatt

SEQ ID NO: 1126 - DNA, 21 bp, Artificial Sequence
  source: /note="Description of Artificial Sequence: Synthetic oligonucleotide"
  source: /note="Description of Combined DNA/RNA Molecule: Synthetic oligonucleotide"
aguacagugcaaugagggatt

SEQ ID NO: 1127 - DNA, 21 bp, Artificial Sequence
  source: /note="Description of Artificial Sequence: Synthetic oligonucleotide"
  source: /note="Description of Combined DNA/RNA Molecule: Synthetic oligonucleotide"
guacagugcaaugagggactt

SEQ ID NO: 1128 - DNA, 21 bp, Artificial Sequence
  source: /note="Description of Artificial Sequence: Synthetic oligonucleotide"
  source: /note="Description of Combined DNA/RNA Molecule: Synthetic oligonucleotide"
uacagugcaaugagggacctt

SEQ ID NO: 1129 - DNA, 21 bp, Artificial Sequence
  source: /note="Description of Artificial Sequence: Synthetic oligonucleotide"
  source: /note="Description of Combined DNA/RNA Molecule: Synthetic oligonucleotide"
acagugcaaugagggaccatt

SEQ ID NO: 1130 - DNA, 21 bp, Artificial Sequence
  source: /note="Description of Artificial Sequence: Synthetic oligonucleotide"
  source: /note="Description of Combined DNA/RNA Molecule: Synthetic oligonucleotide"
cagugcaaugagggaccagtt

SEQ ID NO: 1131 - DNA, 21 bp, Artificial Sequence
  source: /note="Description of Artificial Sequence: Synthetic oligonucleotide"
  source: /note="Description of Combined DNA/RNA Molecule: Synthetic oligonucleotide"
agugcaaugagggaccagutt

SEQ ID NO: 1132 - DNA, 21 bp, Artificial Sequence
  source: /note="Description of Artificial Sequence: Synthetic oligonucleotide"
  source: /note="Description of Combined DNA/RNA Molecule: Synthetic oligonucleotide"
gugcaaugagggaccaguatt

SEQ ID NO: 1133 - DNA, 21 bp, Artificial Sequence
  source: /note="Description of Artificial Sequence: Synthetic oligonucleotide"
  source: /note="Description of Combined DNA/RNA Molecule: Synthetic oligonucleotide"
ugcaaugagggaccaguactt

SEQ ID NO: 1134 - DNA, 21 bp, Artificial Sequence
  source: /note="Description of Artificial Sequence: Synthetic oligonucleotide"
  source: /note="Description of Combined DNA/RNA Molecule: Synthetic oligonucleotide"
gcaaugagggaccaguacatt

SEQ ID NO: 1135 - DNA, 21 bp, Artificial Sequence
  source: /note="Description of Artificial Sequence: Synthetic oligonucleotide"
  source: /note="Description of Combined DNA/RNA Molecule: Synthetic oligonucleotide"
caaugagggaccaguacautt

SEQ ID NO: 1136 - DNA, 21 bp, Artificial Sequence
  source: /note="Description of Artificial Sequence: Synthetic oligonucleotide"
  source: /note="Description of Combined DNA/RNA Molecule: Synthetic oligonucleotide"
aaugagggaccaguacaugtt

SEQ ID NO: 1137 - DNA, 21 bp, Artificial Sequence
  source: /note="Description of Artificial Sequence: Synthetic oligonucleotide"
  source: /note="Description of Combined DNA/RNA Molecule: Synthetic oligonucleotide"
augagggaccaguacaugatt

SEQ ID NO: 1138 - DNA, 21 bp, Artificial Sequence
  source: /note="Description of Artificial Sequence: Synthetic oligonucleotide"
  source: /note="Description of Combined DNA/RNA Molecule: Synthetic oligonucleotide"
ugagggaccaguacaugagtt

SEQ ID NO: 1139 - DNA, 21 bp, Artificial Sequence
  source: /note="Description of Artificial Sequence: Synthetic oligonucleotide"
  source: /note="Description of Combined DNA/RNA Molecule: Synthetic oligonucleotide"
gagggaccaguacaugaggtt

SEQ ID NO: 1140 - DNA, 21 bp, Artificial Sequence
  source: /note="Description of Artificial Sequence: Synthetic oligonucleotide"
  source: /note="Description of Combined DNA/RNA Molecule: Synthetic oligonucleotide"
agggaccaguacaugaggatt

SEQ ID NO: 1141 - DNA, 21 bp, Artificial Sequence
  source: /note="Description of Artificial Sequence: Synthetic oligonucleotide"
  source: /note="Description of Combined DNA/RNA Molecule: Synthetic oligonucleotide"
gggaccaguacaugaggactt

SEQ ID NO: 1142 - DNA, 21 bp, Artificial Sequence
  source: /note="Description of Artificial Sequence: Synthetic oligonucleotide"
  source: /note="Description of Combined DNA/RNA Molecule: Synthetic oligonucleotide"
ggaccaguacaugaggacutt

SEQ ID NO: 1143 - DNA, 21 bp, Artificial Sequence
  source: /note="Description of Artificial Sequence: Synthetic oligonucleotide"
  source: /note="Description of Combined DNA/RNA Molecule: Synthetic oligonucleotide"
gaccaguacaugaggacugtt

SEQ ID NO: 1144 - DNA, 21 bp, Artificial Sequence
  source: /note="Description of Artificial Sequence: Synthetic oligonucleotide"
  source: /note="Description of Combined DNA/RNA Molecule: Synthetic oligonucleotide"
accaguacaugaggacuggtt

SEQ ID NO: 1145 - DNA, 21 bp, Artificial Sequence
  source: /note="Description of Artificial Sequence: Synthetic oligonucleotide"
  source: /note="Description of Combined DNA/RNA Molecule: Synthetic oligonucleotide"
ccaguacaugaggacugggtt

SEQ ID NO: 1146 - DNA, 21 bp, Artificial Sequence
  source: /note="Description of Artificial Sequence: Synthetic oligonucleotide"
  source: /note="Description of Combined DNA/RNA Molecule: Synthetic oligonucleotide"
caguacaugaggacuggggtt

SEQ ID NO: 1147 - DNA, 21 bp, Artificial Sequence
  source: /note="Description of Artificial Sequence: Synthetic oligonucleotide"
  source: /note="Description of Combined DNA/RNA Molecule: Synthetic oligonucleotide"
aguacaugaggacuggggatt

SEQ ID NO: 1148 - DNA, 21 bp, Artificial Sequence
  source: /note="Description of Artificial Sequence: Synthetic oligonucleotide"
  source: /note="Description of Combined DNA/RNA Molecule: Synthetic oligonucleotide"
guacaugaggacuggggagtt

SEQ ID NO: 1149 - DNA, 21 bp, Artificial Sequence
  source: /note="Description of Artificial Sequence: Synthetic oligonucleotide"
  source: /note="Description of Combined DNA/RNA Molecule: Synthetic oligonucleotide"
uacaugaggacuggggaggtt

SEQ ID NO: 1150 - DNA, 21 bp, Artificial Sequence
  source: /note="Description of Artificial Sequence: Synthetic oligonucleotide"
  source: /note="Description of Combined DNA/RNA Molecule: Synthetic oligonucleotide"
acaugaggacuggggagggtt

SEQ ID NO: 1151 - DNA, 21 bp, Artificial Sequence
  source: /note="Description of Artificial Sequence: Synthetic oligonucleotide"
  source: /note="Description of Combined DNA/RNA Molecule: Synthetic oligonucleotide"
caugaggacuggggagggctt

SEQ ID NO: 1152 - DNA, 21 bp, Artificial Sequence
  source: /note="Description of Artificial Sequence: Synthetic oligonucleotide"
  source: /note="Description of Combined DNA/RNA Molecule: Synthetic oligonucleotide"
augaggacuggggagggcutt

SEQ ID NO: 1153 - DNA, 21 bp, Artificial Sequence
  source: /note="Description of Artificial Sequence: Synthetic oligonucleotide"
  source: /note="Description of Combined DNA/RNA Molecule: Synthetic oligonucleotide"
ugaggacuggggagggcuutt

SEQ ID NO: 1154 - DNA, 21 bp, Artificial Sequence
  source: /note="Description of Artificial Sequence: Synthetic oligonucleotide"
  source: /note="Description of Combined DNA/RNA Molecule: Synthetic oligonucleotide"
gaggacuggggagggcuuutt

SEQ ID NO: 1155 - DNA, 21 bp, Artificial Sequence
  source: /note="Description of Artificial Sequence: Synthetic oligonucleotide"
  source: /note="Description of Combined DNA/RNA Molecule: Synthetic oligonucleotide"
aggacuggggagggcuuuctt

SEQ ID NO: 1156 - DNA, 21 bp, Artificial Sequence
  source: /note="Description of Artificial Sequence: Synthetic oligonucleotide"
  source: /note="Description of Combined DNA/RNA Molecule: Synthetic oligonucleotide"
ggacuggggagggcuuucutt

SEQ ID NO: 1157 - DNA, 21 bp, Artificial Sequence
  source: /note="Description of Artificial Sequence: Synthetic oligonucleotide"
  source: /note="Description of Combined DNA/RNA Molecule: Synthetic oligonucleotide"
gacuggggagggcuuucuutt

SEQ ID NO: 1158 - DNA, 21 bp, Artificial Sequence
  source: /note="Description of Artificial Sequence: Synthetic oligonucleotide"
  source: /note="Description of Combined DNA/RNA Molecule: Synthetic oligonucleotide"
acuggggagggcuuucuuutt

SEQ ID NO: 1159 - DNA, 21 bp, Artificial Sequence
  source: /note="Description of Artificial Sequence: Synthetic oligonucleotide"
  source: /note="Description of Combined DNA/RNA Molecule: Synthetic oligonucleotide"
cuggggagggcuuucuuugtt

SEQ ID NO: 1160 - DNA, 21 bp, Artificial Sequence
  source: /note="Description of Artificial Sequence: Synthetic oligonucleotide"
  source: /note="Description of Combined DNA/RNA Molecule: Synthetic oligonucleotide"
uggggagggcuuucuuugutt

SEQ ID NO: 1161 - DNA, 21 bp, Artificial Sequence
  source: /note="Description of Artificial Sequence: Synthetic oligonucleotide"
  source: /note="Description of Combined DNA/RNA Molecule: Synthetic oligonucleotide"
uugccauaaauaauacuaatt

SEQ ID NO: 1162 - DNA, 21 bp, Artificial Sequence
  source: /note="Description of Artificial Sequence: Synthetic oligonucleotide"
  source: /note="Description of Combined DNA/RNA Molecule: Synthetic oligonucleotide"
ugccauaaauaauacuaaatt

SEQ ID NO: 1163 - DNA, 21 bp, Artificial Sequence
  source: /note="Description of Artificial Sequence: Synthetic oligonucleotide"
  source: /note="Description of Combined DNA/RNA Molecule: Synthetic oligonucleotide"
gccauaaauaauacuaaautt

SEQ ID NO: 1164 - DNA, 21 bp, Artificial Sequence
  source: /note="Description of Artificial Sequence: Synthetic oligonucleotide"
  source: /note="Description of Combined DNA/RNA Molecule: Synthetic oligonucleotide"
ccauaaauaauacuaaauctt

SEQ ID NO: 1165 - DNA, 21 bp, Artificial Sequence
  source: /note="Description of Artificial Sequence: Synthetic oligonucleotide"
  source: /note="Description of Combined DNA/RNA Molecule: Synthetic oligonucleotide"
cauaaauaauacuaaaucatt

SEQ ID NO: 1166 - DNA, 21 bp, Artificial Sequence
  source: /note="Description of Artificial Sequence: Synthetic oligonucleotide"
  source: /note="Description of Combined DNA/RNA Molecule: Synthetic oligonucleotide"
auaaauaauacuaaaucautt

SEQ ID NO: 1167 - DNA, 21 bp, Artificial Sequence
  source: /note="Description of Artificial Sequence: Synthetic oligonucleotide"
  source: /note="Description of Combined DNA/RNA Molecule: Synthetic oligonucleotide"
uaaauaauacuaaaucauutt

SEQ ID NO: 1168 - DNA, 21 bp, Artificial Sequence
  source: /note="Description of Artificial Sequence: Synthetic oligonucleotide"
  source: /note="Description of Combined DNA/RNA Molecule: Synthetic oligonucleotide"
aaauaauacuaaaucauuutt

SEQ ID NO: 1169 - DNA, 21 bp, Artificial Sequence
  source: /note="Description of Artificial Sequence: Synthetic oligonucleotide"
  source: /note="Description of Combined DNA/RNA Molecule: Synthetic oligonucleotide"
aauaauacuaaaucauuugtt

SEQ ID NO: 1170 - DNA, 21 bp, Artificial Sequence
  source: /note="Description of Artificial Sequence: Synthetic oligonucleotide"
  source: /note="Description of Combined DNA/RNA Molecule: Synthetic oligonucleotide"
auaauacuaaaucauuugatt

SEQ ID NO: 1171 - DNA, 21 bp, Artificial Sequence
  source: /note="Description of Artificial Sequence: Synthetic oligonucleotide"
  source: /note="Description of Combined DNA/RNA Molecule: Synthetic oligonucleotide"
uaauacuaaaucauuugaatt

SEQ ID NO: 1172 - DNA, 21 bp, Artificial Sequence
  source: /note="Description of Artificial Sequence: Synthetic oligonucleotide"
  source: /note="Description of Combined DNA/RNA Molecule: Synthetic oligonucleotide"
aauacuaaaucauuugaagtt

SEQ ID NO: 1173 - DNA, 21 bp, Artificial Sequence
  source: /note="Description of Artificial Sequence: Synthetic oligonucleotide"
  source: /note="Description of Combined DNA/RNA Molecule: Synthetic oligonucleotide"
auacuaaaucauuugaagatt

SEQ ID NO: 1174 - DNA, 21 bp, Artificial Sequence
  source: /note="Description of Artificial Sequence: Synthetic oligonucleotide"
  source: /note="Description of Combined DNA/RNA Molecule: Synthetic oligonucleotide"
uacuaaaucauuugaagautt

SEQ ID NO: 1175 - DNA, 21 bp, Artificial Sequence
  source: /note="Description of Artificial Sequence: Synthetic oligonucleotide"
  source: /note="Description of Combined DNA/RNA Molecule: Synthetic oligonucleotide"
acuaaaucauuugaagauatt

SEQ ID NO: 1176 - DNA, 21 bp, Artificial Sequence
  source: /note="Description of Artificial Sequence: Synthetic oligonucleotide"
  source: /note="Description of Combined DNA/RNA Molecule: Synthetic oligonucleotide"
cuaaaucauuugaagauautt

SEQ ID NO: 1177 - DNA, 21 bp, Artificial Sequence
  source: /note="Description of Artificial Sequence: Synthetic oligonucleotide"
  source: /note="Description of Combined DNA/RNA Molecule: Synthetic oligonucleotide"
uaaaucauuugaagauauutt

SEQ ID NO: 1178 - DNA, 21 bp, Artificial Sequence
  source: /note="Description of Artificial Sequence: Synthetic oligonucleotide"
  source: /note="Description of Combined DNA/RNA Molecule: Synthetic oligonucleotide"
aaaucauuugaagauauuctt

SEQ ID NO: 1179 - DNA, 21 bp, Artificial Sequence
  source: /note="Description of Artificial Sequence: Synthetic oligonucleotide"
  source: /note="Description of Combined DNA/RNA Molecule: Synthetic oligonucleotide"
aaucauuugaagauauucatt

SEQ ID NO: 1180 - DNA, 21 bp, Artificial Sequence
  source: /note="Description of Artificial Sequence: Synthetic oligonucleotide"
  source: /note="Description of Combined DNA/RNA Molecule: Synthetic oligonucleotide"
ucauuugaagauauucacctt

SEQ ID NO: 1181 - DNA, 21 bp, Artificial Sequence
  source: /note="Description of Artificial Sequence: Synthetic oligonucleotide"
  source: /note="Description of Combined DNA/RNA Molecule: Synthetic oligonucleotide"
cauuugaagauauucaccatt

SEQ ID NO: 1182 - DNA, 21 bp, Artificial Sequence
  source: /note="Description of Artificial Sequence: Synthetic oligonucleotide"
  source: /note="Description of Combined DNA/RNA Molecule: Synthetic oligonucleotide"
auuugaagauauucaccautt

SEQ ID NO: 1183 - DNA, 21 bp, Artificial Sequence
  source: /note="Description of Artificial Sequence: Synthetic oligonucleotide"
  source: /note="Description of Combined DNA/RNA Molecule: Synthetic oligonucleotide"
uuugaagauauucaccauutt

SEQ ID NO: 1184 - DNA, 21 bp, Artificial Sequence
  source: /note="Description of Artificial Sequence: Synthetic oligonucleotide"
  source: /note="Description of Combined DNA/RNA Molecule: Synthetic oligonucleotide"
uugaagauauucaccauuatt

SEQ ID NO: 1185 - DNA, 21 bp, Artificial Sequence
  source: /note="Description of Artificial Sequence: Synthetic oligonucleotide"
  source: /note="Description of Combined DNA/RNA Molecule: Synthetic oligonucleotide"
gagaacaaauuaaaagagutt

SEQ ID NO: 1186 - DNA, 21 bp, Artificial Sequence
  source: /note="Description of Artificial Sequence: Synthetic oligonucleotide"
  source: /note="Description of Combined DNA/RNA Molecule: Synthetic oligonucleotide"
agaacaaauuaaaagaguutt

SEQ ID NO: 1187 - DNA, 21 bp, Artificial Sequence
  source: /note="Description of Artificial Sequence: Synthetic oligonucleotide"
  source: /note="Description of Combined DNA/RNA Molecule: Synthetic oligonucleotide"
gaacaaauuaaaagaguuatt

SEQ ID NO: 1188 - DNA, 21 bp, Artificial Sequence
  source: /note="Description of Artificial Sequence: Synthetic oligonucleotide"
  source: /note="Description of Combined DNA/RNA Molecule: Synthetic oligonucleotide"
aacaaauuaaaagaguuaatt

SEQ ID NO: 1189 - DNA, 21 bp, Artificial Sequence
  source: /note="Description of Artificial Sequence: Synthetic oligonucleotide"
  source: /note="Description of Combined DNA/RNA Molecule: Synthetic oligonucleotide"
acaaauuaaaagaguuaagtt

SEQ ID NO: 1190 - DNA, 21 bp, Artificial Sequence
  source: /note="Description of Artificial Sequence: Synthetic oligonucleotide"
  source: /note="Description of Combined DNA/RNA Molecule: Synthetic oligonucleotide"
caaauuaaaagaguuaaggtt

SEQ ID NO: 1191 - DNA, 21 bp, Artificial Sequence
  source: /note="Description of Artificial Sequence: Synthetic oligonucleotide"
  source: /note="Description of Combined DNA/RNA Molecule: Synthetic oligonucleotide"
aaauuaaaagaguuaaggatt

SEQ ID NO: 1192 - DNA, 21 bp, Artificial Sequence
  source: /note="Description of Artificial Sequence: Synthetic oligonucleotide"
  source: /note="Description of Combined DNA/RNA Molecule: Synthetic oligonucleotide"
aauuaaaagaguuaaggactt

SEQ ID NO: 1193 - DNA, 21 bp, Artificial Sequence
  source: /note="Description of Artificial Sequence: Synthetic oligonucleotide"
  source: /note="Description of Combined DNA/RNA Molecule: Synthetic oligonucleotide"
auuaaaagaguuaaggacutt

SEQ ID NO: 1194 - DNA, 21 bp, Artificial Sequence
  source: /note="Description of Artificial Sequence: Synthetic oligonucleotide"
  source: /note="Description of Combined DNA/RNA Molecule: Synthetic oligonucleotide"
uuaaaagaguuaaggacuctt

SEQ ID NO: 1195 - DNA, 21 bp, Artificial Sequence
  source: /note="Description of Artificial Sequence: Synthetic oligonucleotide"
  source: /note="Description of Combined DNA/RNA Molecule: Synthetic oligonucleotide"
uaaaagaguuaaggacucutt

SEQ ID NO: 1196 - DNA, 21 bp, Artificial Sequence
  source: /note="Description of Artificial Sequence: Synthetic oligonucleotide"
  source: /note="Description of Combined DNA/RNA Molecule: Synthetic oligonucleotide"
aaaagaguuaaggacucugtt

SEQ ID NO: 1197 - DNA, 21 bp, Artificial Sequence
  source: /note="Description of Artificial Sequence: Synthetic oligonucleotide"
  source: /note="Description of Combined DNA/RNA Molecule: Synthetic oligonucleotide"
aaagaguuaaggacucugatt

SEQ ID NO: 1198 - DNA, 21 bp, Artificial Sequence
  source: /note="Description of Artificial Sequence: Synthetic oligonucleotide"
  source: /note="Description of Combined DNA/RNA Molecule: Synthetic oligonucleotide"
aagaguuaaggacucugaatt

SEQ ID NO: 1199 - DNA, 21 bp, Artificial Sequence
  source: /note="Description of Artificial Sequence: Synthetic oligonucleotide"
  source: /note="Description of Combined DNA/RNA Molecule: Synthetic oligonucleotide"
gaguuaaggacucugaagatt

SEQ ID NO: 1200 - DNA, 21 bp, Artificial Sequence
  source: /note="Description of Artificial Sequence: Synthetic oligonucleotide"
  source: /note="Description of Combined DNA/RNA Molecule: Synthetic oligonucleotide"
aguuaaggacucugaagautt

SEQ ID NO: 1201 - DNA, 21 bp, Artificial Sequence
  source: /note="Description of Artificial Sequence: Synthetic oligonucleotide"
  source: /note="Description of Combined DNA/RNA Molecule: Synthetic oligonucleotide"
guuaaggacucugaagaugtt

SEQ ID NO: 1202 - DNA, 21 bp, Artificial Sequence
  source: /note="Description of Artificial Sequence: Synthetic oligonucleotide"
  source: /note="Description of Combined DNA/RNA Molecule: Synthetic oligonucleotide"
uuaaggacucugaagaugutt

SEQ ID NO: 1203 - DNA, 21 bp, Artificial Sequence
  source: /note="Description of Artificial Sequence: Synthetic oligonucleotide"
  source: /note="Description of Combined DNA/RNA Molecule: Synthetic oligonucleotide"
aaggacucugaagauguactt

SEQ ID NO: 1204 - DNA, 21 bp, Artificial Sequence
  source: /note="Description of Artificial Sequence: Synthetic oligonucleotide"
  source: /note="Description of Combined DNA/RNA Molecule: Synthetic oligonucleotide"
aggacucugaagauguacctt

SEQ ID NO: 1205 - DNA, 21 bp, Artificial Sequence
  source: /note="Description of Artificial Sequence: Synthetic oligonucleotide"
  source: /note="Description of Combined DNA/RNA Molecule: Synthetic oligonucleotide"
ggacucugaagauguaccutt

SEQ ID NO: 1206 - DNA, 21 bp, Artificial Sequence
  source: /note="Description of Artificial Sequence: Synthetic oligonucleotide"
  source: /note="Description of Combined DNA/RNA Molecule: Synthetic oligonucleotide"
gacucugaagauguaccuatt

SEQ ID NO: 1207 - DNA, 21 bp, Artificial Sequence
  source: /note="Description of Artificial Sequence: Synthetic oligonucleotide"
  source: /note="Description of Combined DNA/RNA Molecule: Synthetic oligonucleotide"
acucugaagauguaccuautt

SEQ ID NO: 1208 - DNA, 21 bp, Artificial Sequence
  source: /note="Description of Artificial Sequence: Synthetic oligonucleotide"
  source: /note="Description of Combined DNA/RNA Molecule: Synthetic oligonucleotide"
cucugaagauguaccuaugtt

SEQ ID NO: 1209 - DNA, 21 bp, Artificial Sequence
  source: /note="Description of Artificial Sequence: Synthetic oligonucleotide"
  source: /note="Description of Combined DNA/RNA Molecule: Synthetic oligonucleotide"
ucugaagauguaccuauggtt

SEQ ID NO: 1210 - DNA, 21 bp, Artificial Sequence
  source: /note="Description of Artificial Sequence: Synthetic oligonucleotide"
  source: /note="Description of Combined DNA/RNA Molecule: Synthetic oligonucleotide"
cugaagauguaccuauggutt

SEQ ID NO: 1211 - DNA, 21 bp, Artificial Sequence
  source: /note="Description of Artificial Sequence: Synthetic oligonucleotide"
  source: /note="Description of Combined DNA/RNA Molecule: Synthetic oligonucleotide"
ugaagauguaccuaugguctt

SEQ ID NO: 1212 - DNA, 21 bp, Artificial Sequence
  source: /note="Description of Artificial Sequence: Synthetic oligonucleotide"
  source: /note="Description of Combined DNA/RNA Molecule: Synthetic oligonucleotide"
guaggaaauaaaugugauutt

SEQ ID NO: 1213 - DNA, 21 bp, Artificial Sequence
  source: /note="Description of Artificial Sequence: Synthetic oligonucleotide"
  source: /note="Description of Combined DNA/RNA Molecule: Synthetic oligonucleotide"
uaggaaauaaaugugauuutt

SEQ ID NO: 1214 - DNA, 21 bp, Artificial Sequence
  source: /note="Description of Artificial Sequence: Synthetic oligonucleotide"
  source: /note="Description of Combined DNA/RNA Molecule: Synthetic oligonucleotide"
aggaaauaaaugugauuugtt

SEQ ID NO: 1215 - DNA, 21 bp, Artificial Sequence
  source: /note="Description of Artificial Sequence: Synthetic oligonucleotide"
  source: /note="Description of Combined DNA/RNA Molecule: Synthetic oligonucleotide"
ggaaauaaaugugauuugctt

SEQ ID NO: 1216 - DNA, 21 bp, Artificial Sequence
  source: /note="Description of Artificial Sequence: Synthetic oligonucleotide"
  source: /note="Description of Combined DNA/RNA Molecule: Synthetic oligonucleotide"
gaaauaaaugugauuugcctt

SEQ ID NO: 1217 - DNA, 21 bp, Artificial Sequence
  source: /note="Description of Artificial Sequence: Synthetic oligonucleotide"
  source: /note="Description of Combined DNA/RNA Molecule: Synthetic oligonucleotide"
aaauaaaugugauuugccutt

SEQ ID NO: 1218 - DNA, 21 bp, Artificial Sequence
  source: /note="Description of Artificial Sequence: Synthetic oligonucleotide"
  source: /note="Description of Combined DNA/RNA Molecule: Synthetic oligonucleotide"
aauaaaugugauuugccuutt

SEQ ID NO: 1219 - DNA, 21 bp, Artificial Sequence
  source: /note="Description of Artificial Sequence: Synthetic oligonucleotide"
  source: /note="Description of Combined DNA/RNA Molecule: Synthetic oligonucleotide"
auaaaugugauuugccuuctt

SEQ ID NO: 1220 - DNA, 21 bp, Artificial Sequence
  source: /note="Description of Artificial Sequence: Synthetic oligonucleotide"
  source: /note="Description of Combined DNA/RNA Molecule: Synthetic oligonucleotide"
uaaaugugauuugccuucutt

SEQ ID NO: 1221 - DNA, 21 bp, Artificial Sequence
  source: /note="Description of Artificial Sequence: Synthetic oligonucleotide"
  source: /note="Description of Combined DNA/RNA Molecule: Synthetic oligonucleotide"
aaaugugauuugccuucuatt

SEQ ID NO: 1222 - DNA, 21 bp, Artificial Sequence
  source: /note="Description of Artificial Sequence: Synthetic oligonucleotide"
  source: /note="Description of Combined DNA/RNA Molecule: Synthetic oligonucleotide"
aaugugauuugccuucuagtt

SEQ ID NO: 1223 - DNA, 21 bp, Artificial Sequence
  source: /note="Description of Artificial Sequence: Synthetic oligonucleotide"
  source: /note="Description of Combined DNA/RNA Molecule: Synthetic oligonucleotide"
augugauuugccuucuagatt

SEQ ID NO: 1224 - DNA, 21 bp, Artificial Sequence
  source: /note="Description of Artificial Sequence: Synthetic oligonucleotide"
  source: /note="Description of Combined DNA/RNA Molecule: Synthetic oligonucleotide"
ugugauuugccuucuagaatt

SEQ ID NO: 1225 - DNA, 21 bp, Artificial Sequence
  source: /note="Description of Artificial Sequence: Synthetic oligonucleotide"
  source: /note="Description of Combined DNA/RNA Molecule: Synthetic oligonucleotide"
gugauuugccuucuagaactt

SEQ ID NO: 1226 - DNA, 21 bp, Artificial Sequence
  source: /note="Description of Artificial Sequence: Synthetic oligonucleotide"
  source: /note="Description of Combined DNA/RNA Molecule: Synthetic oligonucleotide"
ugauuugccuucuagaacatt

SEQ ID NO: 1227 - DNA, 21 bp, Artificial Sequence
  source: /note="Description of Artificial Sequence: Synthetic oligonucleotide"
  source: /note="Description of Combined DNA/RNA Molecule: Synthetic oligonucleotide"
gauuugccuucuagaacagtt

SEQ ID NO: 1228 - DNA, 21 bp, Artificial Sequence
  source: /note="Description of Artificial Sequence: Synthetic oligonucleotide"
  source: /note="Description of Combined DNA/RNA Molecule: Synthetic oligonucleotide"
auuugccuucuagaacagutt

SEQ ID NO: 1229 - DNA, 21 bp, Artificial Sequence
  source: /note="Description of Artificial Sequence: Synthetic oligonucleotide"
  source: /note="Description of Combined DNA/RNA Molecule: Synthetic oligonucleotide"
uuugccuucuagaacaguatt

SEQ ID NO: 1230 - DNA, 21 bp, Artificial Sequence
  source: /note="Description of Artificial Sequence: Synthetic oligonucleotide"
  source: /note="Description of Combined DNA/RNA Molecule: Synthetic oligonucleotide"
ugccuucuagaacaguagatt

SEQ ID NO: 1231 - DNA, 21 bp, Artificial Sequence
  source: /note="Description of Artificial Sequence: Synthetic oligonucleotide"
  source: /note="Description of Combined DNA/RNA Molecule: Synthetic oligonucleotide"
gccuucuagaacaguagactt

SEQ ID NO: 1232 - DNA, 21 bp, Artificial Sequence
  source: /note="Description of Artificial Sequence: Synthetic oligonucleotide"
  source: /note="Description of Combined DNA/RNA Molecule: Synthetic oligonucleotide"
ccuucuagaacaguagacatt

SEQ ID NO: 1233 - DNA, 21 bp, Artificial Sequence
  source: /note="Description of Artificial Sequence: Synthetic oligonucleotide"
  source: /note="Description of Combined DNA/RNA Molecule: Synthetic oligonucleotide"
cuucuagaacaguagacactt

SEQ ID NO: 1234 - DNA, 21 bp, Artificial Sequence
  source: /note="Description of Artificial Sequence: Synthetic oligonucleotide"
  source: /note="Description of Combined DNA/RNA Molecule: Synthetic oligonucleotide"
uucuagaacaguagacacatt

SEQ ID NO: 1235 - DNA, 21 bp, Artificial Sequence
  source: /note="Description of Artificial Sequence: Synthetic oligonucleotide"
  source: /note="Description of Combined DNA/RNA Molecule: Synthetic oligonucleotide"
ucuagaacaguagacacaatt

SEQ ID NO: 1236 - DNA, 21 bp, Artificial Sequence
  source: /note="Description of Artificial Sequence: Synthetic oligonucleotide"
  source: /note="Description of Combined DNA/RNA Molecule: Synthetic oligonucleotide"
cuagaacaguagacacaaatt

SEQ ID NO: 1237 - DNA, 21 bp, Artificial Sequence
  source: /note="Description of Artificial Sequence: Synthetic oligonucleotide"
  source: /note="Description of Combined DNA/RNA Molecule: Synthetic oligonucleotide"
uagaacaguagacacaaaatt

SEQ ID NO: 1238 - DNA, 21 bp, Artificial Sequence
  source: /note="Description of Artificial Sequence: Synthetic oligonucleotide"
  source: /note="Description of Combined DNA/RNA Molecule: Synthetic oligonucleotide"
agaacaguagacacaaaactt

SEQ ID NO: 1239 - DNA, 21 bp, Artificial Sequence
  source: /note="Description of Artificial Sequence: Synthetic oligonucleotide"
  source: /note="Description of Combined DNA/RNA Molecule: Synthetic oligonucleotide"
gaacaguagacacaaaacatt

SEQ ID NO: 1240 - DNA, 21 bp, Artificial Sequence
  source: /note="Description of Artificial Sequence: Synthetic oligonucleotide"
  source: /note="Description of Combined DNA/RNA Molecule: Synthetic oligonucleotide"
aacaguagacacaaaacagtt

SEQ ID NO: 1241 - DNA, 21 bp, Artificial Sequence
  source: /note="Description of Artificial Sequence: Synthetic oligonucleotide"
  source: /note="Description of Combined DNA/RNA Molecule: Synthetic oligonucleotide"
acaguagacacaaaacaggtt

SEQ ID NO: 1242 - DNA, 21 bp, Artificial Sequence
  source: /note="Description of Artificial Sequence: Synthetic oligonucleotide"
  source: /note="Description of Combined DNA/RNA Molecule: Synthetic oligonucleotide"
caguagacacaaaacaggctt

SEQ ID NO: 1243 - DNA, 21 bp, Artificial Sequence
  source: /note="Description of Artificial Sequence: Synthetic oligonucleotide"
  source: /note="Description of Combined DNA/RNA Molecule: Synthetic oligonucleotide"
aguagacacaaaacaggcutt

SEQ ID NO: 1244 - DNA, 21 bp, Artificial Sequence
  source: /note="Description of Artificial Sequence: Synthetic oligonucleotide"
  source: /note="Description of Combined DNA/RNA Molecule: Synthetic oligonucleotide"
guagacacaaaacaggcuctt

SEQ ID NO: 1245 - DNA, 21 bp, Artificial Sequence
  source: /note="Description of Artificial Sequence: Synthetic oligonucleotide"
  source: /note="Description of Combined DNA/RNA Molecule: Synthetic oligonucleotide"
uagacacaaaacaggcucatt

SEQ ID NO: 1246 - DNA, 21 bp, Artificial Sequence
  source: /note="Description of Artificial Sequence: Synthetic oligonucleotide"
  source: /note="Description of Combined DNA/RNA Molecule: Synthetic oligonucleotide"
agacacaaaacaggcucagtt

SEQ ID NO: 1247 - DNA, 21 bp, Artificial Sequence
  source: /note="Description of Artificial Sequence: Synthetic oligonucleotide"
  source: /note="Description of Combined DNA/RNA Molecule: Synthetic oligonucleotide"
gacacaaaacaggcucaggtt

SEQ ID NO: 1248 - DNA, 21 bp, Artificial Sequence
  source: /note="Description of Artificial Sequence: Synthetic oligonucleotide"
  source: /note="Description of Combined DNA/RNA Molecule: Synthetic oligonucleotide"
acacaaaacaggcucaggatt

SEQ ID NO: 1249 - DNA, 21 bp, Artificial Sequence
  source: /note="Description of Artificial Sequence: Synthetic oligonucleotide"
  source: /note="Description of Combined DNA/RNA Molecule: Synthetic oligonucleotide"
cacaaaacaggcucaggactt

SEQ ID NO: 1250 - DNA, 21 bp, Artificial Sequence
  source: /note="Description of Artificial Sequence: Synthetic oligonucleotide"
  source: /note="Description of Combined DNA/RNA Molecule: Synthetic oligonucleotide"
acaaaacaggcucaggacutt

SEQ ID NO: 1251 - DNA, 21 bp, Artificial Sequence
  source: /note="Description of Artificial Sequence: Synthetic oligonucleotide"
  source: /note="Description of Combined DNA/RNA Molecule: Synthetic oligonucleotide"
caaaacaggcucaggacuutt

SEQ ID NO: 1252 - DNA, 21 bp, Artificial Sequence
  source: /note="Description of Artificial Sequence: Synthetic oligonucleotide"
  source: /note="Description of Combined DNA/RNA Molecule: Synthetic oligonucleotide"
aaaacaggcucaggacuuatt

SEQ ID NO: 1253 - DNA, 21 bp, Artificial Sequence
  source: /note="Description of Artificial Sequence: Synthetic oligonucleotide"
  source: /note="Description of Combined DNA/RNA Molecule: Synthetic oligonucleotide"
aaacaggcucaggacuuagtt

SEQ ID NO: 1254 - DNA, 21 bp, Artificial Sequence
  source: /note="Description of Artificial Sequence: Synthetic oligonucleotide"
  source: /note="Description of Combined DNA/RNA Molecule: Synthetic oligonucleotide"
aacaggcucaggacuuagctt

SEQ ID NO: 1255 - DNA, 21 bp, Artificial Sequence
  source: /note="Description of Artificial Sequence: Synthetic oligonucleotide"
  source: /note="Description of Combined DNA/RNA Molecule: Synthetic oligonucleotide"
acaggcucaggacuuagcatt

SEQ ID NO: 1256 - DNA, 21 bp, Artificial Sequence
  source: /note="Description of Artificial Sequence: Synthetic oligonucleotide"
  source: /note="Description of Combined DNA/RNA Molecule: Synthetic oligonucleotide"
caggcucaggacuuagcaatt

SEQ ID NO: 1257 - DNA, 21 bp, Artificial Sequence
  source: /note="Description of Artificial Sequence: Synthetic oligonucleotide"
  source: /note="Description of Combined DNA/RNA Molecule: Synthetic oligonucleotide"
aggcucaggacuuagcaagtt

SEQ ID NO: 1258 - DNA, 21 bp, Artificial Sequence
  source: /note="Description of Artificial Sequence: Synthetic oligonucleotide"
  source: /note="Description of Combined DNA/RNA Molecule: Synthetic oligonucleotide"
ggcucaggacuuagcaagatt

SEQ ID NO: 1259 - DNA, 21 bp, Artificial Sequence
  source: /note="Description of Artificial Sequence: Synthetic oligonucleotide"
  source: /note="Description of Combined DNA/RNA Molecule: Synthetic oligonucleotide"
gcucaggacuuagcaagaatt

SEQ ID NO: 1260 - DNA, 21 bp, Artificial Sequence
  source: /note="Description of Artificial Sequence: Synthetic oligonucleotide"
  source: /note="Description of Combined DNA/RNA Molecule: Synthetic oligonucleotide"
cucaggacuuagcaagaagtt

SEQ ID NO: 1261 - DNA, 21 bp, Artificial Sequence
  source: /note="Description of Artificial Sequence: Synthetic oligonucleotide"
  source: /note="Description of Combined DNA/RNA Molecule: Synthetic oligonucleotide"
ucaggacuuagcaagaagutt

SEQ ID NO: 1262 - DNA, 21 bp, Artificial Sequence
  source: /note="Description of Artificial Sequence: Synthetic oligonucleotide"
  source: /note="Description of Combined DNA/RNA Molecule: Synthetic oligonucleotide"
caggacuuagcaagaaguutt

SEQ ID NO: 1263 - DNA, 21 bp, Artificial Sequence
  source: /note="Description of Artificial Sequence: Synthetic oligonucleotide"
  source: /note="Description of Combined DNA/RNA Molecule: Synthetic oligonucleotide"
aggacuuagcaagaaguuatt

SEQ ID NO: 1264 - DNA, 21 bp, Artificial Sequence
  source: /note="Description of Artificial Sequence: Synthetic oligonucleotide"
  source: /note="Description of Combined DNA/RNA Molecule: Synthetic oligonucleotide"
ggacuuagcaagaaguuautt

SEQ ID NO: 1265 - DNA, 21 bp, Artificial Sequence
  source: /note="Description of Artificial Sequence: Synthetic oligonucleotide"
  source: /note="Description of Combined DNA/RNA Molecule: Synthetic oligonucleotide"
gacuuagcaagaaguuaugtt

SEQ ID NO: 1266 - DNA, 21 bp, Artificial Sequence
  source: /note="Description of Artificial Sequence: Synthetic oligonucleotide"
  source: /note="Description of Combined DNA/RNA Molecule: Synthetic oligonucleotide"
acuuagcaagaaguuauggtt

SEQ ID NO: 1267 - DNA, 21 bp, Artificial Sequence
  source: /note="Description of Artificial Sequence: Synthetic oligonucleotide"
  source: /note="Description of Combined DNA/RNA Molecule: Synthetic oligonucleotide"
cuuagcaagaaguuauggatt

SEQ ID NO: 1268 - DNA, 21 bp, Artificial Sequence
  source: /note="Description of Artificial Sequence: Synthetic oligonucleotide"
  source: /note="Description of Combined DNA/RNA Molecule: Synthetic oligonucleotide"
uuagcaagaaguuauggaatt

SEQ ID NO: 1269 - DNA, 21 bp, Artificial Sequence
  source: /note="Description of Artificial Sequence: Synthetic oligonucleotide"
  source: /note="Description of Combined DNA/RNA Molecule: Synthetic oligonucleotide"
uagcaagaaguuauggaautt

SEQ ID NO: 1270 - DNA, 21 bp, Artificial Sequence
  source: /note="Description of Artificial Sequence: Synthetic oligonucleotide"
  source: /note="Description of Combined DNA/RNA Molecule: Synthetic oligonucleotide"
agcaagaaguuauggaauutt

SEQ ID NO: 1271 - DNA, 21 bp, Artificial Sequence
  source: /note="Description of Artificial Sequence: Synthetic oligonucleotide"
  source: /note="Description of Combined DNA/RNA Molecule: Synthetic oligonucleotide"
gcaagaaguuauggaauuctt

SEQ ID NO: 1272 - DNA, 21 bp, Artificial Sequence
  source: /note="Description of Artificial Sequence: Synthetic oligonucleotide"
  source: /note="Description of Combined DNA/RNA Molecule: Synthetic oligonucleotide"
caagaaguuauggaauucctt

SEQ ID NO: 1273 - DNA, 21 bp, Artificial Sequence
  source: /note="Description of Artificial Sequence: Synthetic oligonucleotide"
  source: /note="Description of Combined DNA/RNA Molecule: Synthetic oligonucleotide"
aagaaguuauggaauuccutt

SEQ ID NO: 1274 - DNA, 21 bp, Artificial Sequence
  source: /note="Description of Artificial Sequence: Synthetic oligonucleotide"
  source: /note="Description of Combined DNA/RNA Molecule: Synthetic oligonucleotide"
agaaguuauggaauuccuutt

SEQ ID NO: 1275 - DNA, 21 bp, Artificial Sequence
  source: /note="Description of Artificial Sequence: Synthetic oligonucleotide"
  source: /note="Description of Combined DNA/RNA Molecule: Synthetic oligonucleotide"
gaaguuauggaauuccuuutt

SEQ ID NO: 1276 - DNA, 21 bp, Artificial Sequence
  source: /note="Description of Artificial Sequence: Synthetic oligonucleotide"
  source: /note="Description of Combined DNA/RNA Molecule: Synthetic oligonucleotide"
aaguuauggaauuccuuuutt

SEQ ID NO: 1277 - DNA, 21 bp, Artificial Sequence
  source: /note="Description of Artificial Sequence: Synthetic oligonucleotide"
  source: /note="Description of Combined DNA/RNA Molecule: Synthetic oligonucleotide"
aguuauggaauuccuuuuatt

SEQ ID NO: 1278 - DNA, 21 bp, Artificial Sequence
  source: /note="Description of Artificial Sequence: Synthetic oligonucleotide"
  source: /note="Description of Combined DNA/RNA Molecule: Synthetic oligonucleotide"
guuauggaauuccuuuuautt

SEQ ID NO: 1279 - DNA, 21 bp, Artificial Sequence
  source: /note="Description of Artificial Sequence: Synthetic oligonucleotide"
  source: /note="Description of Combined DNA/RNA Molecule: Synthetic oligonucleotide"
uuauggaauuccuuuuauutt

SEQ ID NO: 1280 - DNA, 21 bp, Artificial Sequence
  source: /note="Description of Artificial Sequence: Synthetic oligonucleotide"
  source: /note="Description of Combined DNA/RNA Molecule: Synthetic oligonucleotide"
uauggaauuccuuuuauugtt

SEQ ID NO: 1281 - DNA, 21 bp, Artificial Sequence
  source: /note="Description of Artificial Sequence: Synthetic oligonucleotide"
  source: /note="Description of Combined DNA/RNA Molecule: Synthetic oligonucleotide"
auggaauuccuuuuauugatt

SEQ ID NO: 1282 - DNA, 21 bp, Artificial Sequence
  source: /note="Description of Artificial Sequence: Synthetic oligonucleotide"
  source: /note="Description of Combined DNA/RNA Molecule: Synthetic oligonucleotide"
uguuggaucauauucgucctt

SEQ ID NO: 1283 - DNA, 21 bp, Artificial Sequence
  source: /note="Description of Artificial Sequence: Synthetic oligonucleotide"
  source: /note="Description of Combined DNA/RNA Molecule: Synthetic oligonucleotide"
uuguuggaucauauucguctt

SEQ ID NO: 1284 - DNA, 21 bp, Artificial Sequence
  source: /note="Description of Artificial Sequence: Synthetic oligonucleotide"
  source: /note="Description of Combined DNA/RNA Molecule: Synthetic oligonucleotide"
auuguuggaucauauucgutt

SEQ ID NO: 1285 - DNA, 21 bp, Artificial Sequence
  source: /note="Description of Artificial Sequence: Synthetic oligonucleotide"
  source: /note="Description of Combined DNA/RNA Molecule: Synthetic oligonucleotide"
uauuguuggaucauauucgtt

SEQ ID NO: 1286 - DNA, 21 bp, Artificial Sequence
  source: /note="Description of Artificial Sequence: Synthetic oligonucleotide"
  source: /note="Description of Combined DNA/RNA Molecule: Synthetic oligonucleotide"
cuauuguuggaucauauuctt

SEQ ID NO: 1287 - DNA, 21 bp, Artificial Sequence
  source: /note="Description of Artificial Sequence: Synthetic oligonucleotide"
  source: /note="Description of Combined DNA/RNA Molecule: Synthetic oligonucleotide"
ucuauuguuggaucauauutt

SEQ ID NO: 1288 - DNA, 21 bp, Artificial Sequence
  source: /note="Description of Artificial Sequence: Synthetic oligonucleotide"
  source: /note="Description of Combined DNA/RNA Molecule: Synthetic oligonucleotide"
cucuauuguuggaucauautt

SEQ ID NO: 1289 - DNA, 21 bp, Artificial Sequence
  source: /note="Description of Artificial Sequence: Synthetic oligonucleotide"
  source: /note="Description of Combined DNA/RNA Molecule: Synthetic oligonucleotide"
ccucuauuguuggaucauatt

SEQ ID NO: 1290 - DNA, 21 bp, Artificial Sequence
  source: /note="Description of Artificial Sequence: Synthetic oligonucleotide"
  source: /note="Description of Combined DNA/RNA Molecule: Synthetic oligonucleotide"
uccucuauuguuggaucautt

SEQ ID NO: 1291 - DNA, 21 bp, Artificial Sequence
  source: /note="Description of Artificial Sequence: Synthetic oligonucleotide"
  source: /note="Description of Combined DNA/RNA Molecule: Synthetic oligonucleotide"
auccucuauuguuggaucatt

SEQ ID NO: 1292 - DNA, 21 bp, Artificial Sequence
  source: /note="Description of Artificial Sequence: Synthetic oligonucleotide"
  source: /note="Description of Combined DNA/RNA Molecule: Synthetic oligonucleotide"
aauccucuauuguuggauctt

SEQ ID NO: 1293 - DNA, 21 bp, Artificial Sequence
  source: /note="Description of Artificial Sequence: Synthetic oligonucleotide"
  source: /note="Description of Combined DNA/RNA Molecule: Synthetic oligonucleotide"
gaauccucuauuguuggautt

SEQ ID NO: 1294 - DNA, 21 bp, Artificial Sequence
  source: /note="Description of Artificial Sequence: Synthetic oligonucleotide"
  source: /note="Description of Combined DNA/RNA Molecule: Synthetic oligonucleotide"
ggaauccucuauuguuggatt

SEQ ID NO: 1295 - DNA, 21 bp, Artificial Sequence
  source: /note="Description of Artificial Sequence: Synthetic oligonucleotide"
  source: /note="Description of Combined DNA/RNA Molecule: Synthetic oligonucleotide"
aggaauccucuauuguuggtt

SEQ ID NO: 1296 - DNA, 21 bp, Artificial Sequence
  source: /note="Description of Artificial Sequence: Synthetic oligonucleotide"
  source: /note="Description of Combined DNA/RNA Molecule: Synthetic oligonucleotide"
uaggaauccucuauuguugtt

SEQ ID NO: 1297 - DNA, 21 bp, Artificial Sequence
  source: /note="Description of Artificial Sequence: Synthetic oligonucleotide"
  source: /note="Description of Combined DNA/RNA Molecule: Synthetic oligonucleotide"
guaggaauccucuauuguutt

SEQ ID NO: 1298 - DNA, 21 bp, Artificial Sequence
  source: /note="Description of Artificial Sequence: Synthetic oligonucleotide"
  source: /note="Description of Combined DNA/RNA Molecule: Synthetic oligonucleotide"
uguaggaauccucuauugutt

SEQ ID NO: 1299 - DNA, 21 bp, Artificial Sequence
  source: /note="Description of Artificial Sequence: Synthetic oligonucleotide"
  source: /note="Description of Combined DNA/RNA Molecule: Synthetic oligonucleotide"
cuguaggaauccucuauugtt

SEQ ID NO: 1300 - DNA, 21 bp, Artificial Sequence
  source: /note="Description of Artificial Sequence: Synthetic oligonucleotide"
  source: /note="Description of Combined DNA/RNA Molecule: Synthetic oligonucleotide"
ccuguaggaauccucuauutt

SEQ ID NO: 1301 - DNA, 21 bp, Artificial Sequence
  source: /note="Description of Artificial Sequence: Synthetic oligonucleotide"
  source: /note="Description of Combined DNA/RNA Molecule: Synthetic oligonucleotide"
uccuguaggaauccucuautt

SEQ ID NO: 1302 - DNA, 21 bp, Artificial Sequence
  source: /note="Description of Artificial Sequence: Synthetic oligonucleotide"
  source: /note="Description of Combined DNA/RNA Molecule: Synthetic oligonucleotide"
uuccuguaggaauccucuatt

SEQ ID NO: 1303 - DNA, 21 bp, Artificial Sequence
  source: /note="Description of Artificial Sequence: Synthetic oligonucleotide"
  source: /note="Description of Combined DNA/RNA Molecule: Synthetic oligonucleotide"
cuuccuguaggaauccucutt

SEQ ID NO: 1304 - DNA, 21 bp, Artificial Sequence
  source: /note="Description of Artificial Sequence: Synthetic oligonucleotide"
  source: /note="Description of Combined DNA/RNA Molecule: Synthetic oligonucleotide"
gcuuccuguaggaauccuctt

SEQ ID NO: 1305 - DNA, 21 bp, Artificial Sequence
  source: /note="Description of Artificial Sequence: Synthetic oligonucleotide"
  source: /note="Description of Combined DNA/RNA Molecule: Synthetic oligonucleotide"
ugcuuccuguaggaauccutt

SEQ ID NO: 1306 - DNA, 21 bp, Artificial Sequence
  source: /note="Description of Artificial Sequence: Synthetic oligonucleotide"
  source: /note="Description of Combined DNA/RNA Molecule: Synthetic oligonucleotide"
uugcuuccuguaggaaucctt

SEQ ID NO: 1307 - DNA, 21 bp, Artificial Sequence
  source: /note="Description of Artificial Sequence: Synthetic oligonucleotide"
  source: /note="Description of Combined DNA/RNA Molecule: Synthetic oligonucleotide"
cuugcuuccuguaggaauctt

SEQ ID NO: 1308 - DNA, 21 bp, Artificial Sequence
  source: /note="Description of Artificial Sequence: Synthetic oligonucleotide"
  source: /note="Description of Combined DNA/RNA Molecule: Synthetic oligonucleotide"
acuugcuuccuguaggaautt

SEQ ID NO: 1309 - DNA, 21 bp, Artificial Sequence
  source: /note="Description of Artificial Sequence: Synthetic oligonucleotide"
  source: /note="Description of Combined DNA/RNA Molecule: Synthetic oligonucleotide"
uacuugcuuccuguaggaatt

SEQ ID NO: 1310 - DNA, 21 bp, Artificial Sequence
  source: /note="Description of Artificial Sequence: Synthetic oligonucleotide"
  source: /note="Description of Combined DNA/RNA Molecule: Synthetic oligonucleotide"
cuacuugcuuccuguaggatt

SEQ ID NO: 1311 - DNA, 21 bp, Artificial Sequence
  source: /note="Description of Artificial Sequence: Synthetic oligonucleotide"
  source: /note="Description of Combined DNA/RNA Molecule: Synthetic oligonucleotide"
acuacuugcuuccuguaggtt

SEQ ID NO: 1312 - DNA, 21 bp, Artificial Sequence
  source: /note="Description of Artificial Sequence: Synthetic oligonucleotide"
  source: /note="Description of Combined DNA/RNA Molecule: Synthetic oligonucleotide"
uacuacuugcuuccuguagtt

SEQ ID NO: 1313 - DNA, 21 bp, Artificial Sequence
  source: /note="Description of Artificial Sequence: Synthetic oligonucleotide"
  source: /note="Description of Combined DNA/RNA Molecule: Synthetic oligonucleotide"
uuacuacuugcuuccuguatt

SEQ ID NO: 1314 - DNA, 21 bp, Artificial Sequence
  source: /note="Description of Artificial Sequence: Synthetic oligonucleotide"
  source: /note="Description of Combined DNA/RNA Molecule: Synthetic oligonucleotide"
auuacuacuugcuuccugutt

SEQ ID NO: 1315 - DNA, 21 bp, Artificial Sequence
  source: /note="Description of Artificial Sequence: Synthetic oligonucleotide"
  source: /note="Description of Combined DNA/RNA Molecule: Synthetic oligonucleotide"
aauuacuacuugcuuccugtt

SEQ ID NO: 1316 - DNA, 21 bp, Artificial Sequence
  source: /note="Description of Artificial Sequence: Synthetic oligonucleotide"
  source: /note="Description of Combined DNA/RNA Molecule: Synthetic oligonucleotide"
cugugucgagaauauccaatt

SEQ ID NO: 1317 - DNA, 21 bp, Artificial Sequence
  source: /note="Description of Artificial Sequence: Synthetic oligonucleotide"
  source: /note="Description of Combined DNA/RNA Molecule: Synthetic oligonucleotide"
gcugugucgagaauauccatt

SEQ ID NO: 1318 - DNA, 21 bp, Artificial Sequence
  source: /note="Description of Artificial Sequence: Synthetic oligonucleotide"
  source: /note="Description of Combined DNA/RNA Molecule: Synthetic oligonucleotide"
ugcugugucgagaauaucctt

SEQ ID NO: 1319 - DNA, 21 bp, Artificial Sequence
  source: /note="Description of Artificial Sequence: Synthetic oligonucleotide"
  source: /note="Description of Combined DNA/RNA Molecule: Synthetic oligonucleotide"
ccugcugugucgagaauautt

SEQ ID NO: 1320 - DNA, 21 bp, Artificial Sequence
  source: /note="Description of Artificial Sequence: Synthetic oligonucleotide"
  source: /note="Description of Combined DNA/RNA Molecule: Synthetic oligonucleotide"
gaccugcugugucgagaautt

SEQ ID NO: 1321 - DNA, 21 bp, Artificial Sequence
  source: /note="Description of Artificial Sequence: Synthetic oligonucleotide"
  source: /note="Description of Combined DNA/RNA Molecule: Synthetic oligonucleotide"
uugaccugcugugucgagatt

SEQ ID NO: 1322 - DNA, 21 bp, Artificial Sequence
  source: /note="Description of Artificial Sequence: Synthetic oligonucleotide"
  source: /note="Description of Combined DNA/RNA Molecule: Synthetic oligonucleotide"
cuugaccugcugugucgagtt

SEQ ID NO: 1323 - DNA, 21 bp, Artificial Sequence
  source: /note="Description of Artificial Sequence: Synthetic oligonucleotide"
  source: /note="Description of Combined DNA/RNA Molecule: Synthetic oligonucleotide"
ucuugaccugcugugucgatt

SEQ ID NO: 1324 - DNA, 21 bp, Artificial Sequence
  source: /note="Description of Artificial Sequence: Synthetic oligonucleotide"
  source: /note="Description of Combined DNA/RNA Molecule: Synthetic oligonucleotide"
cucuugaccugcugugucgtt

SEQ ID NO: 1325 - DNA, 21 bp, Artificial Sequence
  source: /note="Description of Artificial Sequence: Synthetic oligonucleotide"
  source: /note="Description of Combined DNA/RNA Molecule: Synthetic oligonucleotide"
ccucuugaccugcuguguctt

SEQ ID NO: 1326 - DNA, 21 bp, Artificial Sequence
  source: /note="Description of Artificial Sequence: Synthetic oligonucleotide"
  source: /note="Description of Combined DNA/RNA Molecule: Synthetic oligonucleotide"
uccucuugaccugcugugutt

SEQ ID NO: 1327 - DNA, 21 bp, Artificial Sequence
  source: /note="Description of Artificial Sequence: Synthetic oligonucleotide"
  source: /note="Description of Combined DNA/RNA Molecule: Synthetic oligonucleotide"
cuccucuugaccugcugugtt

SEQ ID NO: 1328 - DNA, 21 bp, Artificial Sequence
  source: /note="Description of Artificial Sequence: Synthetic oligonucleotide"
  source: /note="Description of Combined DNA/RNA Molecule: Synthetic oligonucleotide"
acuccucuugaccugcugutt

SEQ ID NO: 1329 - DNA, 21 bp, Artificial Sequence
  source: /note="Description of Artificial Sequence: Synthetic oligonucleotide"
  source: /note="Description of Combined DNA/RNA Molecule: Synthetic oligonucleotide"
uacuccucuugaccugcugtt

SEQ ID NO: 1330 - DNA, 21 bp, Artificial Sequence
  source: /note="Description of Artificial Sequence: Synthetic oligonucleotide"
  source: /note="Description of Combined DNA/RNA Molecule: Synthetic oligonucleotide"
guacuccucuugaccugcutt

SEQ ID NO: 1331 - DNA, 21 bp, Artificial Sequence
  source: /note="Description of Artificial Sequence: Synthetic oligonucleotide"
  source: /note="Description of Combined DNA/RNA Molecule: Synthetic oligonucleotide"
uguacuccucuugaccugctt

SEQ ID NO: 1332 - DNA, 21 bp, Artificial Sequence
  source: /note="Description of Artificial Sequence: Synthetic oligonucleotide"
  source: /note="Description of Combined DNA/RNA Molecule: Synthetic oligonucleotide"
cuguacuccucuugaccugtt

SEQ ID NO: 1333 - DNA, 21 bp, Artificial Sequence
  source: /note="Description of Artificial Sequence: Synthetic oligonucleotide"
  source: /note="Description of Combined DNA/RNA Molecule: Synthetic oligonucleotide"
acuguacuccucuugaccutt

SEQ ID NO: 1334 - DNA, 21 bp, Artificial Sequence
  source: /note="Description of Artificial Sequence: Synthetic oligonucleotide"
  source: /note="Description of Combined DNA/RNA Molecule: Synthetic oligonucleotide"
cacuguacuccucuugacctt

SEQ ID NO: 1335 - DNA, 21 bp, Artificial Sequence
  source: /note="Description of Artificial Sequence: Synthetic oligonucleotide"
  source: /note="Description of Combined DNA/RNA Molecule: Synthetic oligonucleotide"
gcacuguacuccucuugactt

SEQ ID NO: 1336 - DNA, 21 bp, Artificial Sequence
  source: /note="Description of Artificial Sequence: Synthetic oligonucleotide"
  source: /note="Description of Combined DNA/RNA Molecule: Synthetic oligonucleotide"
ugcacuguacuccucuugatt

SEQ ID NO: 1337 - DNA, 21 bp, Artificial Sequence
  source: /note="Description of Artificial Sequence: Synthetic oligonucleotide"
  source: /note="Description of Combined DNA/RNA Molecule: Synthetic oligonucleotide"
uugcacuguacuccucuugtt

SEQ ID NO: 1338 - DNA, 21 bp, Artificial Sequence
  source: /note="Description of Artificial Sequence: Synthetic oligonucleotide"
  source: /note="Description of Combined DNA/RNA Molecule: Synthetic oligonucleotide"
auugcacuguacuccucuutt

SEQ ID NO: 1339 - DNA, 21 bp, Artificial Sequence
  source: /note="Description of Artificial Sequence: Synthetic oligonucleotide"
  source: /note="Description of Combined DNA/RNA Molecule: Synthetic oligonucleotide"
cauugcacuguacuccucutt

SEQ ID NO: 1340 - DNA, 21 bp, Artificial Sequence
  source: /note="Description of Artificial Sequence: Synthetic oligonucleotide"
  source: /note="Description of Combined DNA/RNA Molecule: Synthetic oligonucleotide"
ucauugcacuguacuccuctt

SEQ ID NO: 1341 - DNA, 21 bp, Artificial Sequence
  source: /note="Description of Artificial Sequence: Synthetic oligonucleotide"
  source: /note="Description of Combined DNA/RNA Molecule: Synthetic oligonucleotide"
cucauugcacuguacuccutt

SEQ ID NO: 1342 - DNA, 21 bp, Artificial Sequence
  source: /note="Description of Artificial Sequence: Synthetic oligonucleotide"
  source: /note="Description of Combined DNA/RNA Molecule: Synthetic oligonucleotide"
ccucauugcacuguacucctt

SEQ ID NO: 1343 - DNA, 21 bp, Artificial Sequence
  source: /note="Description of Artificial Sequence: Synthetic oligonucleotide"
  source: /note="Description of Combined DNA/RNA Molecule: Synthetic oligonucleotide"
cccucauugcacuguacuctt

SEQ ID NO: 1344 - DNA, 21 bp, Artificial Sequence
  source: /note="Description of Artificial Sequence: Synthetic oligonucleotide"
  source: /note="Description of Combined DNA/RNA Molecule: Synthetic oligonucleotide"
cacaaagaaagcccucccctt

SEQ ID NO: 1345 - DNA, 21 bp, Artificial Sequence
  source: /note="Description of Artificial Sequence: Synthetic oligonucleotide"
  source: /note="Description of Combined DNA/RNA Molecule: Synthetic oligonucleotide"
acacaaagaaagcccuccctt

SEQ ID NO: 1346 - DNA, 21 bp, Artificial Sequence
  source: /note="Description of Artificial Sequence: Synthetic oligonucleotide"
  source: /note="Description of Combined DNA/RNA Molecule: Synthetic oligonucleotide"
uacacaaagaaagcccucctt

SEQ ID NO: 1347 - DNA, 21 bp, Artificial Sequence
  source: /note="Description of Artificial Sequence: Synthetic oligonucleotide"
  source: /note="Description of Combined DNA/RNA Molecule: Synthetic oligonucleotide"
auacacaaagaaagcccuctt

SEQ ID NO: 1348 - DNA, 21 bp, Artificial Sequence
  source: /note="Description of Artificial Sequence: Synthetic oligonucleotide"
  source: /note="Description of Combined DNA/RNA Molecule: Synthetic oligonucleotide"
aauacacaaagaaagcccutt

SEQ ID NO: 1349 - DNA, 21 bp, Artificial Sequence
  source: /note="Description of Artificial Sequence: Synthetic oligonucleotide"
  source: /note="Description of Combined DNA/RNA Molecule: Synthetic oligonucleotide"
aaauacacaaagaaagccctt

SEQ ID NO: 1350 - DNA, 21 bp, Artificial Sequence
  source: /note="Description of Artificial Sequence: Synthetic oligonucleotide"
  source: /note="Description of Combined DNA/RNA Molecule: Synthetic oligonucleotide"
caaauacacaaagaaagcctt

SEQ ID NO: 1351 - DNA, 21 bp, Artificial Sequence
  source: /note="Description of Artificial Sequence: Synthetic oligonucleotide"
  source: /note="Description of Combined DNA/RNA Molecule: Synthetic oligonucleotide"
gcaaauacacaaagaaagctt

SEQ ID NO: 1352 - DNA, 21 bp, Artificial Sequence
  source: /note="Description of Artificial Sequence: Synthetic oligonucleotide"
  source: /note="Description of Combined DNA/RNA Molecule: Synthetic oligonucleotide"
ggcaaauacacaaagaaagtt

SEQ ID NO: 1353 - DNA, 21 bp, Artificial Sequence
  source: /note="Description of Artificial Sequence: Synthetic oligonucleotide"
  source: /note="Description of Combined DNA/RNA Molecule: Synthetic oligonucleotide"
uggcaaauacacaaagaaatt

SEQ ID NO: 1354 - DNA, 21 bp, Artificial Sequence
  source: /note="Description of Artificial Sequence: Synthetic oligonucleotide"
  source: /note="Description of Combined DNA/RNA Molecule: Synthetic oligonucleotide"
auggcaaauacacaaagaatt

SEQ ID NO: 1355 - DNA, 21 bp, Artificial Sequence
  source: /note="Description of Artificial Sequence: Synthetic oligonucleotide"
  source: /note="Description of Combined DNA/RNA Molecule: Synthetic oligonucleotide"
uauggcaaauacacaaagatt

SEQ ID NO: 1356 - DNA, 21 bp, Artificial Sequence
  source: /note="Description of Artificial Sequence: Synthetic oligonucleotide"
  source: /note="Description of Combined DNA/RNA Molecule: Synthetic oligonucleotide"
uuauggcaaauacacaaagtt

SEQ ID NO: 1357 - DNA, 21 bp, Artificial Sequence
  source: /note="Description of Artificial Sequence: Synthetic oligonucleotide"
  source: /note="Description of Combined DNA/RNA Molecule: Synthetic oligonucleotide"
uuuauggcaaauacacaaatt

SEQ ID NO: 1358 - DNA, 21 bp, Artificial Sequence
  source: /note="Description of Artificial Sequence: Synthetic oligonucleotide"
  source: /note="Description of Combined DNA/RNA Molecule: Synthetic oligonucleotide"
auuuauggcaaauacacaatt

SEQ ID NO: 1359 - DNA, 21 bp, Artificial Sequence
  source: /note="Description of Artificial Sequence: Synthetic oligonucleotide"
  source: /note="Description of Combined DNA/RNA Molecule: Synthetic oligonucleotide"
uauuuauggcaaauacacatt

SEQ ID NO: 1360 - DNA, 21 bp, Artificial Sequence
  source: /note="Description of Artificial Sequence: Synthetic oligonucleotide"
  source: /note="Description of Combined DNA/RNA Molecule: Synthetic oligonucleotide"
uuauuuauggcaaauacactt

SEQ ID NO: 1361 - DNA, 21 bp, Artificial Sequence
  source: /note="Description of Artificial Sequence: Synthetic oligonucleotide"
  source: /note="Description of Combined DNA/RNA Molecule: Synthetic oligonucleotide"
auuauuuauggcaaauacatt

SEQ ID NO: 1362 - DNA, 21 bp, Artificial Sequence
  source: /note="Description of Artificial Sequence: Synthetic oligonucleotide"
  source: /note="Description of Combined DNA/RNA Molecule: Synthetic oligonucleotide"
uauuauuuauggcaaauactt

SEQ ID NO: 1363 - DNA, 21 bp, Artificial Sequence
  source: /note="Description of Artificial Sequence: Synthetic oligonucleotide"
  source: /note="Description of Combined DNA/RNA Molecule: Synthetic oligonucleotide"
guauuauuuauggcaaauatt

SEQ ID NO: 1364 - DNA, 21 bp, Artificial Sequence
  source: /note="Description of Artificial Sequence: Synthetic oligonucleotide"
  source: /note="Description of Combined DNA/RNA Molecule: Synthetic oligonucleotide"
aguauuauuuauggcaaautt

SEQ ID NO: 1365 - DNA, 21 bp, Artificial Sequence
  source: /note="Description of Artificial Sequence: Synthetic oligonucleotide"
  source: /note="Description of Combined DNA/RNA Molecule: Synthetic oligonucleotide"
uaguauuauuuauggcaaatt

SEQ ID NO: 1366 - DNA, 21 bp, Artificial Sequence
  source: /note="Description of Artificial Sequence: Synthetic oligonucleotide"
  source: /note="Description of Combined DNA/RNA Molecule: Synthetic oligonucleotide"
auaauggugaauaucuucatt

SEQ ID NO: 1367 - DNA, 21 bp, Artificial Sequence
  source: /note="Description of Artificial Sequence: Synthetic oligonucleotide"
  source: /note="Description of Combined DNA/RNA Molecule: Synthetic oligonucleotide"
uauaauggugaauaucuuctt

SEQ ID NO: 1368 - DNA, 21 bp, Artificial Sequence
  source: /note="Description of Artificial Sequence: Synthetic oligonucleotide"
  source: /note="Description of Combined DNA/RNA Molecule: Synthetic oligonucleotide"
ucuauaauggugaauaucutt

SEQ ID NO: 1369 - DNA, 21 bp, Artificial Sequence
  source: /note="Description of Artificial Sequence: Synthetic oligonucleotide"
  source: /note="Description of Combined DNA/RNA Molecule: Synthetic oligonucleotide"
cuugucuuugcugauguuutt

SEQ ID NO: 1370 - DNA, 21 bp, Artificial Sequence
  source: /note="Description of Artificial Sequence: Synthetic oligonucleotide"
  source: /note="Description of Combined DNA/RNA Molecule: Synthetic oligonucleotide"
ucuugucuuugcugauguutt

SEQ ID NO: 1371 - DNA, 21 bp, Artificial Sequence
  source: /note="Description of Artificial Sequence: Synthetic oligonucleotide"
  source: /note="Description of Combined DNA/RNA Molecule: Synthetic oligonucleotide"
gucuugucuuugcugaugutt

SEQ ID NO: 1372 - DNA, 21 bp, Artificial Sequence
  source: /note="Description of Artificial Sequence: Synthetic oligonucleotide"
  source: /note="Description of Combined DNA/RNA Molecule: Synthetic oligonucleotide"
ugucuugucuuugcugaugtt

SEQ ID NO: 1373 - DNA, 21 bp, Artificial Sequence
  source: /note="Description of Artificial Sequence: Synthetic oligonucleotide"
  source: /note="Description of Combined DNA/RNA Molecule: Synthetic oligonucleotide"
cugucuugucuuugcugautt

SEQ ID NO: 1374 - DNA, 21 bp, Artificial Sequence
  source: /note="Description of Artificial Sequence: Synthetic oligonucleotide"
  source: /note="Description of Combined DNA/RNA Molecule: Synthetic oligonucleotide"
cugcugugucgagaauauctt

SEQ ID NO: 1375 - DNA, 21 bp, Artificial Sequence
  source: /note="Description of Artificial Sequence: Synthetic oligonucleotide"
  source: /note="Description of Combined DNA/RNA Molecule: Synthetic oligonucleotide"
uguucucuauaauggugaatt

SEQ ID NO: 1376 - DNA, 21 bp, Artificial Sequence
  source: /note="Description of Artificial Sequence: Synthetic oligonucleotide"
  source: /note="Description of Combined DNA/RNA Molecule: Synthetic oligonucleotide"
accugcugugucgagaauatt

SEQ ID NO: 1377 - DNA, 21 bp, Artificial Sequence
  source: /note="Description of Artificial Sequence: Synthetic oligonucleotide"
  source: /note="Description of Combined DNA/RNA Molecule: Synthetic oligonucleotide"
ugaccugcugugucgagaatt

SEQ ID NO: 1378 - DNA, 21 bp, Artificial Sequence
  source: /note="Description of Artificial Sequence: Synthetic oligonucleotide"
  source: /note="Description of Combined DNA/RNA Molecule: Synthetic oligonucleotide"
cuauaauggugaauaucuutt

SEQ ID NO: 1379 - DNA, 21 bp, Artificial Sequence
  source: /note="Description of Artificial Sequence: Synthetic oligonucleotide"
  source: /note="Description of Combined DNA/RNA Molecule: Synthetic oligonucleotide"
cucuauaauggugaauauctt

SEQ ID NO: 1380 - DNA, 21 bp, Artificial Sequence
  source: /note="Description of Artificial Sequence: Synthetic oligonucleotide"
  source: /note="Description of Combined DNA/RNA Molecule: Synthetic oligonucleotide"
ucucuauaauggugaauautt

SEQ ID NO: 1381 - DNA, 21 bp, Artificial Sequence
  source: /note="Description of Artificial Sequence: Synthetic oligonucleotide"
  source: /note="Description of Combined DNA/RNA Molecule: Synthetic oligonucleotide"
uucucuauaauggugaauatt

SEQ ID NO: 1382 - DNA, 21 bp, Artificial Sequence
  source: /note="Description of Artificial Sequence: Synthetic oligonucleotide"
  source: /note="Description of Combined DNA/RNA Molecule: Synthetic oligonucleotide"
guucucuauaauggugaautt

SEQ ID NO: 1383 - DNA, 21 bp, Artificial Sequence
  source: /note="Description of Artificial Sequence: Synthetic oligonucleotide"
  source: /note="Description of Combined DNA/RNA Molecule: Synthetic oligonucleotide"
uuguucucuauaauggugatt

SEQ ID NO: 1384 - DNA, 21 bp, Artificial Sequence
  source: /note="Description of Artificial Sequence: Synthetic oligonucleotide"
  source: /note="Description of Combined DNA/RNA Molecule: Synthetic oligonucleotide"
uuuguucucuauaauggugtt

SEQ ID NO: 1385 - DNA, 21 bp, Artificial Sequence
  source: /note="Description of Artificial Sequence: Synthetic oligonucleotide"
  source: /note="Description of Combined DNA/RNA Molecule: Synthetic oligonucleotide"
auuuguucucuauaauggutt

SEQ ID NO: 1386 - DNA, 21 bp, Artificial Sequence
  source: /note="Description of Artificial Sequence: Synthetic oligonucleotide"
  source: /note="Description of Combined DNA/RNA Molecule: Synthetic oligonucleotide"
aauuuguucucuauaauggtt

SEQ ID NO: 1387 - DNA, 21 bp, Artificial Sequence
  source: /note="Description of Artificial Sequence: Synthetic oligonucleotide"
  source: /note="Description of Combined DNA/RNA Molecule: Synthetic oligonucleotide"
uaauuuguucucuauaaugtt

SEQ ID NO: 1388 - DNA, 21 bp, Artificial Sequence
  source: /note="Description of Artificial Sequence: Synthetic oligonucleotide"
  source: /note="Description of Combined DNA/RNA Molecule: Synthetic oligonucleotide"
uuaauuuguucucuauaautt

SEQ ID NO: 1389 - DNA, 21 bp, Artificial Sequence
  source: /note="Description of Artificial Sequence: Synthetic oligonucleotide"
  source: /note="Description of Combined DNA/RNA Molecule: Synthetic oligonucleotide"
uuuaauuuguucucuauaatt

SEQ ID NO: 1390 - DNA, 21 bp, Artificial Sequence
  source: /note="Description of Artificial Sequence: Synthetic oligonucleotide"
  source: /note="Description of Combined DNA/RNA Molecule: Synthetic oligonucleotide"
uuuuaauuuguucucuauatt

SEQ ID NO: 1391 - DNA, 21 bp, Artificial Sequence
  source: /note="Description of Artificial Sequence: Synthetic oligonucleotide"
  source: /note="Description of Combined DNA/RNA Molecule: Synthetic oligonucleotide"
cuuuuaauuuguucucuautt

SEQ ID NO: 1392 - DNA, 21 bp, Artificial Sequence
  source: /note="Description of Artificial Sequence: Synthetic oligonucleotide"
  source: /note="Description of Combined DNA/RNA Molecule: Synthetic oligonucleotide"
ucuuuuaauuuguucucuatt

SEQ ID NO: 1393 - DNA, 21 bp, Artificial Sequence
  source: /note="Description of Artificial Sequence: Synthetic oligonucleotide"
  source: /note="Description of Combined DNA/RNA Molecule: Synthetic oligonucleotide"
cucuuuuaauuuguucucutt

SEQ ID NO: 1394 - DNA, 21 bp, Artificial Sequence
  source: /note="Description of Artificial Sequence: Synthetic oligonucleotide"
  source: /note="Description of Combined DNA/RNA Molecule: Synthetic oligonucleotide"
ggaccauagguacaucuuctt

SEQ ID NO: 1395 - DNA, 21 bp, Artificial Sequence
  source: /note="Description of Artificial Sequence: Synthetic oligonucleotide"
  source: /note="Description of Combined DNA/RNA Molecule: Synthetic oligonucleotide"
aggaccauagguacaucuutt

SEQ ID NO: 1396 - DNA, 21 bp, Artificial Sequence
  source: /note="Description of Artificial Sequence: Synthetic oligonucleotide"
  source: /note="Description of Combined DNA/RNA Molecule: Synthetic oligonucleotide"
uaggaccauagguacaucutt

SEQ ID NO: 1397 - DNA, 21 bp, Artificial Sequence
  source: /note="Description of Artificial Sequence: Synthetic oligonucleotide"
  source: /note="Description of Combined DNA/RNA Molecule: Synthetic oligonucleotide"
cuaggaccauagguacauctt

SEQ ID NO: 1398 - DNA, 21 bp, Artificial Sequence
  source: /note="Description of Artificial Sequence: Synthetic oligonucleotide"
  source: /note="Description of Combined DNA/RNA Molecule: Synthetic oligonucleotide"
acuaggaccauagguacautt

SEQ ID NO: 1399 - DNA, 21 bp, Artificial Sequence
  source: /note="Description of Artificial Sequence: Synthetic oligonucleotide"
  source: /note="Description of Combined DNA/RNA Molecule: Synthetic oligonucleotide"
uacuaggaccauagguacatt

SEQ ID NO: 1400 - DNA, 21 bp, Artificial Sequence
  source: /note="Description of Artificial Sequence: Synthetic oligonucleotide"
  source: /note="Description of Combined DNA/RNA Molecule: Synthetic oligonucleotide"
cuacuaggaccauagguactt

SEQ ID NO: 1401 - DNA, 21 bp, Artificial Sequence
  source: /note="Description of Artificial Sequence: Synthetic oligonucleotide"
  source: /note="Description of Combined DNA/RNA Molecule: Synthetic oligonucleotide"
ccuacuaggaccauagguatt

SEQ ID NO: 1402 - DNA, 21 bp, Artificial Sequence
  source: /note="Description of Artificial Sequence: Synthetic oligonucleotide"
  source: /note="Description of Combined DNA/RNA Molecule: Synthetic oligonucleotide"
uccuacuaggaccauaggutt

SEQ ID NO: 1403 - DNA, 21 bp, Artificial Sequence
  source: /note="Description of Artificial Sequence: Synthetic oligonucleotide"
  source: /note="Description of Combined DNA/RNA Molecule: Synthetic oligonucleotide"
uuccuacuaggaccauaggtt

SEQ ID NO: 1404 - DNA, 21 bp, Artificial Sequence
  source: /note="Description of Artificial Sequence: Synthetic oligonucleotide"
  source: /note="Description of Combined DNA/RNA Molecule: Synthetic oligonucleotide"
uuuccuacuaggaccauagtt

SEQ ID NO: 1405 - DNA, 21 bp, Artificial Sequence
  source: /note="Description of Artificial Sequence: Synthetic oligonucleotide"
  source: /note="Description of Combined DNA/RNA Molecule: Synthetic oligonucleotide"
auuuccuacuaggaccauatt

SEQ ID NO: 1406 - DNA, 21 bp, Artificial Sequence
  source: /note="Description of Artificial Sequence: Synthetic oligonucleotide"
  source: /note="Description of Combined DNA/RNA Molecule: Synthetic oligonucleotide"
uauuuccuacuaggaccautt

SEQ ID NO: 1407 - DNA, 21 bp, Artificial Sequence
  source: /note="Description of Artificial Sequence: Synthetic oligonucleotide"
  source: /note="Description of Combined DNA/RNA Molecule: Synthetic oligonucleotide"
uuauuuccuacuaggaccatt

SEQ ID NO: 1408 - DNA, 21 bp, Artificial Sequence
  source: /note="Description of Artificial Sequence: Synthetic oligonucleotide"
  source: /note="Description of Combined DNA/RNA Molecule: Synthetic oligonucleotide"
uuuauuuccuacuaggacctt

SEQ ID NO: 1409 - DNA, 21 bp, Artificial Sequence
  source: /note="Description of Artificial Sequence: Synthetic oligonucleotide"
  source: /note="Description of Combined DNA/RNA Molecule: Synthetic oligonucleotide"
auuuauuuccuacuaggactt

SEQ ID NO: 1410 - DNA, 21 bp, Artificial Sequence
  source: /note="Description of Artificial Sequence: Synthetic oligonucleotide"
  source: /note="Description of Combined DNA/RNA Molecule: Synthetic oligonucleotide"
cauuuauuuccuacuaggatt

SEQ ID NO: 1411 - DNA, 21 bp, Artificial Sequence
  source: /note="Description of Artificial Sequence: Synthetic oligonucleotide"
  source: /note="Description of Combined DNA/RNA Molecule: Synthetic oligonucleotide"
acauuuauuuccuacuaggtt

SEQ ID NO: 1412 - DNA, 21 bp, Artificial Sequence
  source: /note="Description of Artificial Sequence: Synthetic oligonucleotide"
  source: /note="Description of Combined DNA/RNA Molecule: Synthetic oligonucleotide"
cacauuuauuuccuacuagtt

SEQ ID NO: 1413 - DNA, 21 bp, Artificial Sequence
  source: /note="Description of Artificial Sequence: Synthetic oligonucleotide"
  source: /note="Description of Combined DNA/RNA Molecule: Synthetic oligonucleotide"
ucacauuuauuuccuacuatt

SEQ ID NO: 1414 - DNA, 21 bp, Artificial Sequence
  source: /note="Description of Artificial Sequence: Synthetic oligonucleotide"
  source: /note="Description of Combined DNA/RNA Molecule: Synthetic oligonucleotide"
aucacauuuauuuccuacutt

SEQ ID NO: 1415 - DNA, 21 bp, Artificial Sequence
  source: /note="Description of Artificial Sequence: Synthetic oligonucleotide"
  source: /note="Description of Combined DNA/RNA Molecule: Synthetic oligonucleotide"
uuucaauaaaaggaauucctt

SEQ ID NO: 1416 - DNA, 21 bp, Artificial Sequence
  source: /note="Description of Artificial Sequence: Synthetic oligonucleotide"
  source: /note="Description of Combined DNA/RNA Molecule: Synthetic oligonucleotide"
guuucaauaaaaggaauuctt

SEQ ID NO: 1417 - DNA, 21 bp, Artificial Sequence
  source: /note="Description of Artificial Sequence: Synthetic oligonucleotide"
  source: /note="Description of Combined DNA/RNA Molecule: Synthetic oligonucleotide"
uguuucaauaaaaggaauutt

SEQ ID NO: 1418 - DNA, 21 bp, Artificial Sequence
  source: /note="Description of Artificial Sequence: Synthetic oligonucleotide"
  source: /note="Description of Combined DNA/RNA Molecule: Synthetic oligonucleotide"
auguuucaauaaaaggaautt

SEQ ID NO: 1419 - DNA, 21 bp, Artificial Sequence
  source: /note="Description of Artificial Sequence: Synthetic oligonucleotide"
  source: /note="Description of Combined DNA/RNA Molecule: Synthetic oligonucleotide"
gauguuucaauaaaaggaatt

SEQ ID NO: 1420 - DNA, 21 bp, Artificial Sequence
  source: /note="Description of Artificial Sequence: Synthetic oligonucleotide"
  source: /note="Description of Combined DNA/RNA Molecule: Synthetic oligonucleotide"
ugauguuucaauaaaaggatt

SEQ ID NO: 1421 - DNA, 21 bp, Artificial Sequence
  source: /note="Description of Artificial Sequence: Synthetic oligonucleotide"
  source: /note="Description of Combined DNA/RNA Molecule: Synthetic oligonucleotide"
cugauguuucaauaaaaggtt

SEQ ID NO: 1422 - DNA, 21 bp, Artificial Sequence
  source: /note="Description of Artificial Sequence: Synthetic oligonucleotide"
  source: /note="Description of Combined DNA/RNA Molecule: Synthetic oligonucleotide"
gcugauguuucaauaaaagtt

SEQ ID NO: 1423 - DNA, 21 bp, Artificial Sequence
  source: /note="Description of Artificial Sequence: Synthetic oligonucleotide"
  source: /note="Description of Combined DNA/RNA Molecule: Synthetic oligonucleotide"
ugcugauguuucaauaaaatt

SEQ ID NO: 1424 - DNA, 21 bp, Artificial Sequence
  source: /note="Description of Artificial Sequence: Synthetic oligonucleotide"
  source: /note="Description of Combined DNA/RNA Molecule: Synthetic oligonucleotide"
uugcugauguuucaauaaatt

SEQ ID NO: 1425 - DNA, 21 bp, Artificial Sequence
  source: /note="Description of Artificial Sequence: Synthetic oligonucleotide"
  source: /note="Description of Combined DNA/RNA Molecule: Synthetic oligonucleotide"
uuugcugauguuucaauaatt

SEQ ID NO: 1426 - DNA, 21 bp, Artificial Sequence
  source: /note="Description of Artificial Sequence: Synthetic oligonucleotide"
  source: /note="Description of Combined DNA/RNA Molecule: Synthetic oligonucleotide"
cuuugcugauguuucaauatt

SEQ ID NO: 1427 - DNA, 21 bp, Artificial Sequence
  source: /note="Description of Artificial Sequence: Synthetic oligonucleotide"
  source: /note="Description of Combined DNA/RNA Molecule: Synthetic oligonucleotide"
ucuuugcugauguuucaautt

SEQ ID NO: 1428 - DNA, 21 bp, Artificial Sequence
  source: /note="Description of Artificial Sequence: Synthetic oligonucleotide"
  source: /note="Description of Combined DNA/RNA Molecule: Synthetic oligonucleotide"
gucuuugcugauguuucaatt

SEQ ID NO: 1429 - DNA, 21 bp, Artificial Sequence
  source: /note="Description of Artificial Sequence: Synthetic oligonucleotide"
  source: /note="Description of Combined DNA/RNA Molecule: Synthetic oligonucleotide"
ugucuuugcugauguuucatt

SEQ ID NO: 1430 - DNA, 21 bp, Artificial Sequence
  source: /note="Description of Artificial Sequence: Synthetic oligonucleotide"
  source: /note="Description of Combined DNA/RNA Molecule: Synthetic oligonucleotide"
uugucuuugcugauguuuctt

SEQ ID NO: 1431 - DNA, 21 bp, Artificial Sequence
  source: /note="Description of Artificial Sequence: Synthetic oligonucleotide"
  source: /note="Description of Combined DNA/RNA Molecule: Synthetic oligonucleotide"
caaguuuauauucagucautt

SEQ ID NO: 1432 - DNA, 21 bp, Artificial Sequence
  source: /note="Description of Artificial Sequence: Synthetic oligonucleotide"
  source: /note="Description of Combined DNA/RNA Molecule: Synthetic oligonucleotide"
acaaguuuauauucagucatt

SEQ ID NO: 1433 - DNA, 21 bp, Artificial Sequence
  source: /note="Description of Artificial Sequence: Synthetic oligonucleotide"
  source: /note="Description of Combined DNA/RNA Molecule: Synthetic oligonucleotide"
cacaaguuuauauucaguctt

SEQ ID NO: 1434 - DNA, 21 bp, Artificial Sequence
  source: /note="Description of Artificial Sequence: Synthetic oligonucleotide"
  source: /note="Description of Combined DNA/RNA Molecule: Synthetic oligonucleotide"
ccacaaguuuauauucagutt

SEQ ID NO: 1435 - DNA, 21 bp, Artificial Sequence
  source: /note="Description of Artificial Sequence: Synthetic oligonucleotide"
  source: /note="Description of Combined DNA/RNA Molecule: Synthetic oligonucleotide"
accacaaguuuauauucagtt

SEQ ID NO: 1436 - DNA, 21 bp, Artificial Sequence
  source: /note="Description of Artificial Sequence: Synthetic oligonucleotide"
  source: /note="Description of Combined DNA/RNA Molecule: Synthetic oligonucleotide"
uaccacaaguuuauauucatt

SEQ ID NO: 1437 - DNA, 21 bp, Artificial Sequence
  source: /note="Description of Artificial Sequence: Synthetic oligonucleotide"
  source: /note="Description of Combined DNA/RNA Molecule: Synthetic oligonucleotide"
cuaccacaaguuuauauuctt

SEQ ID NO: 1438 - DNA, 21 bp, Artificial Sequence
  source: /note="Description of Artificial Sequence: Synthetic oligonucleotide"
  source: /note="Description of Combined DNA/RNA Molecule: Synthetic oligonucleotide"
acuaccacaaguuuauauutt

SEQ ID NO: 1439 - DNA, 21 bp, Artificial Sequence
  source: /note="Description of Artificial Sequence: Synthetic oligonucleotide"
  source: /note="Description of Combined DNA/RNA Molecule: Synthetic oligonucleotide"
aacuaccacaaguuuauautt

SEQ ID NO: 1440 - DNA, 21 bp, Artificial Sequence
  source: /note="Description of Artificial Sequence: Synthetic oligonucleotide"
  source: /note="Description of Combined DNA/RNA Molecule: Synthetic oligonucleotide"
caacuaccacaaguuuauatt

SEQ ID NO: 1441 - DNA, 21 bp, Artificial Sequence
  source: /note="Description of Artificial Sequence: Synthetic oligonucleotide"
  source: /note="Description of Combined DNA/RNA Molecule: Synthetic oligonucleotide"
ccaacuaccacaaguuuautt

SEQ ID NO: 1442 - DNA, 21 bp, Artificial Sequence
  source: /note="Description of Artificial Sequence: Synthetic oligonucleotide"
  source: /note="Description of Combined DNA/RNA Molecule: Synthetic oligonucleotide"
uccaacuaccacaaguuuatt

SEQ ID NO: 1443 - DNA, 21 bp, Artificial Sequence
  source: /note="Description of Artificial Sequence: Synthetic oligonucleotide"
  source: /note="Description of Combined DNA/RNA Molecule: Synthetic oligonucleotide"
cuccaacuaccacaaguuutt

SEQ ID NO: 1444 - DNA, 21 bp, Artificial Sequence
  source: /note="Description of Artificial Sequence: Synthetic oligonucleotide"
  source: /note="Description of Combined DNA/RNA Molecule: Synthetic oligonucleotide"
gcuccaacuaccacaaguutt

SEQ ID NO: 1445 - DNA, 21 bp, Artificial Sequence
  source: /note="Description of Artificial Sequence: Synthetic oligonucleotide"
  source: /note="Description of Combined DNA/RNA Molecule: Synthetic oligonucleotide"
agcuccaacuaccacaagutt

SEQ ID NO: 1446 - DNA, 21 bp, Artificial Sequence
  source: /note="Description of Artificial Sequence: Synthetic oligonucleotide"
  source: /note="Description of Combined DNA/RNA Molecule: Synthetic oligonucleotide"
cagcuccaacuaccacaagtt

SEQ ID NO: 1447 - DNA, 21 bp, Artificial Sequence
  source: /note="Description of Artificial Sequence: Synthetic oligonucleotide"
  source: /note="Description of Combined DNA/RNA Molecule: Synthetic oligonucleotide"
ccagcuccaacuaccacaatt

SEQ ID NO: 1448 - DNA, 21 bp, Artificial Sequence
  source: /note="Description of Artificial Sequence: Synthetic oligonucleotide"
  source: /note="Description of Combined DNA/RNA Molecule: Synthetic oligonucleotide"
accagcuccaacuaccacatt

SEQ ID NO: 1449 - DNA, 21 bp, Artificial Sequence
  source: /note="Description of Artificial Sequence: Synthetic oligonucleotide"
  source: /note="Description of Combined DNA/RNA Molecule: Synthetic oligonucleotide"
caccagcuccaacuaccactt

SEQ ID NO: 1450 - DNA, 21 bp, Artificial Sequence
  source: /note="Description of Artificial Sequence: Synthetic oligonucleotide"
  source: /note="Description of Combined DNA/RNA Molecule: Synthetic oligonucleotide"
ccaccagcuccaacuaccatt

SEQ ID NO: 1451 - DNA, 21 bp, Artificial Sequence
  source: /note="Description of Artificial Sequence: Synthetic oligonucleotide"
  source: /note="Description of Combined DNA/RNA Molecule: Synthetic oligonucleotide"
gccaccagcuccaacuacctt

SEQ ID NO: 1452 - DNA, 21 bp, Artificial Sequence
  source: /note="Description of Artificial Sequence: Synthetic oligonucleotide"
  source: /note="Description of Combined DNA/RNA Molecule: Synthetic oligonucleotide"
cgccaccagcuccaacuactt

SEQ ID NO: 1453 - DNA, 21 bp, Artificial Sequence
  source: /note="Description of Artificial Sequence: Synthetic oligonucleotide"
  source: /note="Description of Combined DNA/RNA Molecule: Synthetic oligonucleotide"
acgccaccagcuccaacuatt

SEQ ID NO: 1454 - DNA, 21 bp, Artificial Sequence
  source: /note="Description of Artificial Sequence: Synthetic oligonucleotide"
  source: /note="Description of Combined DNA/RNA Molecule: Synthetic oligonucleotide"
uacgccaccagcuccaacutt

SEQ ID NO: 1455 - DNA, 21 bp, Artificial Sequence
  source: /note="Description of Artificial Sequence: Synthetic oligonucleotide"
  source: /note="Description of Combined DNA/RNA Molecule: Synthetic oligonucleotide"
cuacgccaccagcuccaactt

SEQ ID NO: 1456 - DNA, 21 bp, Artificial Sequence
  source: /note="Description of Artificial Sequence: Synthetic oligonucleotide"
  source: /note="Description of Combined DNA/RNA Molecule: Synthetic oligonucleotide"
ccuacgccaccagcuccaatt

SEQ ID NO: 1457 - DNA, 21 bp, Artificial Sequence
  source: /note="Description of Artificial Sequence: Synthetic oligonucleotide"
  source: /note="Description of Combined DNA/RNA Molecule: Synthetic oligonucleotide"
gccuacgccaccagcuccatt

SEQ ID NO: 1458 - DNA, 21 bp, Artificial Sequence
  source: /note="Description of Artificial Sequence: Synthetic oligonucleotide"
  source: /note="Description of Combined DNA/RNA Molecule: Synthetic oligonucleotide"
ugccuacgccaccagcucctt

SEQ ID NO: 1459 - DNA, 21 bp, Artificial Sequence
  source: /note="Description of Artificial Sequence: Synthetic oligonucleotide"
  source: /note="Description of Combined DNA/RNA Molecule: Synthetic oligonucleotide"
uugccuacgccaccagcuctt

SEQ ID NO: 1460 - DNA, 21 bp, Artificial Sequence
  source: /note="Description of Artificial Sequence: Synthetic oligonucleotide"
  source: /note="Description of Combined DNA/RNA Molecule: Synthetic oligonucleotide"
cuugccuacgccaccagcutt

SEQ ID NO: 1461 - DNA, 21 bp, Artificial Sequence
  source: /note="Description of Artificial Sequence: Synthetic oligonucleotide"
  source: /note="Description of Combined DNA/RNA Molecule: Synthetic oligonucleotide"
ucuugccuacgccaccagctt

SEQ ID NO: 1462 - DNA, 21 bp, Artificial Sequence
  source: /note="Description of Artificial Sequence: Synthetic oligonucleotide"
  source: /note="Description of Combined DNA/RNA Molecule: Synthetic oligonucleotide"
cucuugccuacgccaccagtt

SEQ ID NO: 1463 - DNA, 21 bp, Artificial Sequence
  source: /note="Description of Artificial Sequence: Synthetic oligonucleotide"
  source: /note="Description of Combined DNA/RNA Molecule: Synthetic oligonucleotide"
acucuugccuacgccaccatt

SEQ ID NO: 1464 - DNA, 21 bp, Artificial Sequence
  source: /note="Description of Artificial Sequence: Synthetic oligonucleotide"
  source: /note="Description of Combined DNA/RNA Molecule: Synthetic oligonucleotide"
cacucuugccuacgccacctt

SEQ ID NO: 1465 - DNA, 21 bp, Artificial Sequence
  source: /note="Description of Artificial Sequence: Synthetic oligonucleotide"
  source: /note="Description of Combined DNA/RNA Molecule: Synthetic oligonucleotide"
gcacucuugccuacgccactt

SEQ ID NO: 1466 - DNA, 21 bp, Artificial Sequence
  source: /note="Description of Artificial Sequence: Synthetic oligonucleotide"
  source: /note="Description of Combined DNA/RNA Molecule: Synthetic oligonucleotide"
ggcacucuugccuacgccatt

SEQ ID NO: 1467 - DNA, 21 bp, Artificial Sequence
  source: /note="Description of Artificial Sequence: Synthetic oligonucleotide"
  source: /note="Description of Combined DNA/RNA Molecule: Synthetic oligonucleotide"
aggcacucuugccuacgcctt

SEQ ID NO: 1468 - DNA, 21 bp, Artificial Sequence
  source: /note="Description of Artificial Sequence: Synthetic oligonucleotide"
  source: /note="Description of Combined DNA/RNA Molecule: Synthetic oligonucleotide"
aaggcacucuugccuacgctt

SEQ ID NO: 1469 - DNA, 21 bp, Artificial Sequence
  source: /note="Description of Artificial Sequence: Synthetic oligonucleotide"
  source: /note="Description of Combined DNA/RNA Molecule: Synthetic oligonucleotide"
caaggcacucuugccuacgtt

SEQ ID NO: 1470 - DNA, 21 bp, Artificial Sequence
  source: /note="Description of Artificial Sequence: Synthetic oligonucleotide"
  source: /note="Description of Combined DNA/RNA Molecule: Synthetic oligonucleotide"
ucaaggcacucuugccuactt

SEQ ID NO: 1471 - DNA, 21 bp, Artificial Sequence
  source: /note="Description of Artificial Sequence: Synthetic oligonucleotide"
  source: /note="Description of Combined DNA/RNA Molecule: Synthetic oligonucleotide"
gucaaggcacucuugccuatt

SEQ ID NO: 1472 - DNA, 21 bp, Artificial Sequence
  source: /note="Description of Artificial Sequence: Synthetic oligonucleotide"
  source: /note="Description of Combined DNA/RNA Molecule: Synthetic oligonucleotide"
cgucaaggcacucuugccutt

SEQ ID NO: 1473 - DNA, 21 bp, Artificial Sequence
  source: /note="Description of Artificial Sequence: Synthetic oligonucleotide"
  source: /note="Description of Combined DNA/RNA Molecule: Synthetic oligonucleotide"
ucgucaaggcacucuugcctt

SEQ ID NO: 1474 - DNA, 21 bp, Artificial Sequence
  source: /note="Description of Artificial Sequence: Synthetic oligonucleotide"
  source: /note="Description of Combined DNA/RNA Molecule: Synthetic oligonucleotide"
aucgucaaggcacucuugctt

SEQ ID NO: 1475 - DNA, 21 bp, Artificial Sequence
  source: /note="Description of Artificial Sequence: Synthetic oligonucleotide"
  source: /note="Description of Combined DNA/RNA Molecule: Synthetic oligonucleotide"
uaucgucaaggcacucuugtt

SEQ ID NO: 1476 - DNA, 21 bp, Artificial Sequence
  source: /note="Description of Artificial Sequence: Synthetic oligonucleotide"
  source: /note="Description of Combined DNA/RNA Molecule: Synthetic oligonucleotide"
guaucgucaaggcacucuutt

SEQ ID NO: 1477 - DNA, 21 bp, Artificial Sequence
  source: /note="Description of Artificial Sequence: Synthetic oligonucleotide"
  source: /note="Description of Combined DNA/RNA Molecule: Synthetic oligonucleotide"
uguaucgucaaggcacucutt

SEQ ID NO: 1478 - DNA, 21 bp, Artificial Sequence
  source: /note="Description of Artificial Sequence: Synthetic oligonucleotide"
  source: /note="Description of Combined DNA/RNA Molecule: Synthetic oligonucleotide"
cuguaucgucaaggcacuctt

SEQ ID NO: 1479 - DNA, 21 bp, Artificial Sequence
  source: /note="Description of Artificial Sequence: Synthetic oligonucleotide"
  source: /note="Description of Combined DNA/RNA Molecule: Synthetic oligonucleotide"
gcuguaucgucaaggcacutt

SEQ ID NO: 1480 - DNA, 21 bp, Artificial Sequence
  source: /note="Description of Artificial Sequence: Synthetic oligonucleotide"
  source: /note="Description of Combined DNA/RNA Molecule: Synthetic oligonucleotide"
agcuguaucgucaaggcactt

SEQ ID NO: 1481 - DNA, 21 bp, Artificial Sequence
  source: /note="Description of Artificial Sequence: Synthetic oligonucleotide"
  source: /note="Description of Combined DNA/RNA Molecule: Synthetic oligonucleotide"
uagcuguaucgucaaggcatt

SEQ ID NO: 1482 - DNA, 21 bp, Artificial Sequence
  source: /note="Description of Artificial Sequence: Synthetic oligonucleotide"
  source: /note="Description of Combined DNA/RNA Molecule: Synthetic oligonucleotide"
uuagcuguaucgucaaggctt

SEQ ID NO: 1483 - DNA, 21 bp, Artificial Sequence
  source: /note="Description of Artificial Sequence: Synthetic oligonucleotide"
  source: /note="Description of Combined DNA/RNA Molecule: Synthetic oligonucleotide"
auuagcuguaucgucaaggtt

SEQ ID NO: 1484 - DNA, 21 bp, Artificial Sequence
  source: /note="Description of Artificial Sequence: Synthetic oligonucleotide"
  source: /note="Description of Combined DNA/RNA Molecule: Synthetic oligonucleotide"
aauuagcuguaucgucaagtt

SEQ ID NO: 1485 - DNA, 21 bp, Artificial Sequence
  source: /note="Description of Artificial Sequence: Synthetic oligonucleotide"
  source: /note="Description of Combined DNA/RNA Molecule: Synthetic oligonucleotide"
gaauuagcuguaucgucaatt

SEQ ID NO: 1486 - DNA, 21 bp, Artificial Sequence
  source: /note="Description of Artificial Sequence: Synthetic oligonucleotide"
  source: /note="Description of Combined DNA/RNA Molecule: Synthetic oligonucleotide"
ugaauuagcuguaucgucatt

SEQ ID NO: 1487 - DNA, 21 bp, Artificial Sequence
  source: /note="Description of Artificial Sequence: Synthetic oligonucleotide"
  source: /note="Description of Combined DNA/RNA Molecule: Synthetic oligonucleotide"
cugaauuagcuguaucguctt

SEQ ID NO: 1488 - DNA, 21 bp, Artificial Sequence
  source: /note="Description of Artificial Sequence: Synthetic oligonucleotide"
  source: /note="Description of Combined DNA/RNA Molecule: Synthetic oligonucleotide"
ucugaauuagcuguaucgutt

SEQ ID NO: 1489 - DNA, 21 bp, Artificial Sequence
  source: /note="Description of Artificial Sequence: Synthetic oligonucleotide"
  source: /note="Description of Combined DNA/RNA Molecule: Synthetic oligonucleotide"
uucugaauuagcuguaucgtt

SEQ ID NO: 1490 - DNA, 21 bp, Artificial Sequence
  source: /note="Description of Artificial Sequence: Synthetic oligonucleotide"
  source: /note="Description of Combined DNA/RNA Molecule: Synthetic oligonucleotide"
auucugaauuagcuguauctt

SEQ ID NO: 1491 - DNA, 21 bp, Artificial Sequence
  source: /note="Description of Artificial Sequence: Synthetic oligonucleotide"
  source: /note="Description of Combined DNA/RNA Molecule: Synthetic oligonucleotide"
gauucugaauuagcuguautt

SEQ ID NO: 1492 - DNA, 21 bp, Artificial Sequence
  source: /note="Description of Artificial Sequence: Synthetic oligonucleotide"
  source: /note="Description of Combined DNA/RNA Molecule: Synthetic oligonucleotide"
ugauucugaauuagcuguatt

SEQ ID NO: 1493 - DNA, 21 bp, Artificial Sequence
  source: /note="Description of Artificial Sequence: Synthetic oligonucleotide"
  source: /note="Description of Combined DNA/RNA Molecule: Synthetic oligonucleotide"
augauucugaauuagcugutt

SEQ ID NO: 1494 - DNA, 21 bp, Artificial Sequence
  source: /note="Description of Artificial Sequence: Synthetic oligonucleotide"
  source: /note="Description of Combined DNA/RNA Molecule: Synthetic oligonucleotide"
aaugauucugaauuagcugtt

SEQ ID NO: 1495 - DNA, 21 bp, Artificial Sequence
  source: /note="Description of Artificial Sequence: Synthetic oligonucleotide"
  source: /note="Description of Combined DNA/RNA Molecule: Synthetic oligonucleotide"
aaaugauucugaauuagcutt

SEQ ID NO: 1496 - DNA, 21 bp, Artificial Sequence
  source: /note="Description of Artificial Sequence: Synthetic oligonucleotide"
  source: /note="Description of Combined DNA/RNA Molecule: Synthetic oligonucleotide"
aaaaugauucugaauuagctt

SEQ ID NO: 1497 - DNA, 21 bp, Artificial Sequence
  source: /note="Description of Artificial Sequence: Synthetic oligonucleotide"
  source: /note="Description of Combined DNA/RNA Molecule: Synthetic oligonucleotide"
caaaaugauucugaauuagtt

SEQ ID NO: 1498 - DNA, 21 bp, Artificial Sequence
  source: /note="Description of Artificial Sequence: Synthetic oligonucleotide"
  source: /note="Description of Combined DNA/RNA Molecule: Synthetic oligonucleotide"
acaaaaugauucugaauuatt

SEQ ID NO: 1499 - DNA, 21 bp, Artificial Sequence
  source: /note="Description of Artificial Sequence: Synthetic oligonucleotide"
  source: /note="Description of Combined DNA/RNA Molecule: Synthetic oligonucleotide"
cacaaaaugauucugaauutt

SEQ ID NO: 1500 - DNA, 21 bp, Artificial Sequence
  source: /note="Description of Artificial Sequence: Synthetic oligonucleotide"
  source: /note="Description of Combined DNA/RNA Molecule: Synthetic oligonucleotide"
ccacaaaaugauucugaautt

SEQ ID NO: 1501 - DNA, 21 bp, Artificial Sequence
  source: /note="Description of Artificial Sequence: Synthetic oligonucleotide"
  source: /note="Description of Combined DNA/RNA Molecule: Synthetic oligonucleotide"
uccacaaaaugauucugaatt

SEQ ID NO: 1502 - DNA, 21 bp, Artificial Sequence
  source: /note="Description of Artificial Sequence: Synthetic oligonucleotide"
  source: /note="Description of Combined DNA/RNA Molecule: Synthetic oligonucleotide"
guccacaaaaugauucugatt

SEQ ID NO: 1503 - DNA, 21 bp, Artificial Sequence
  source: /note="Description of Artificial Sequence: Synthetic oligonucleotide"
  source: /note="Description of Combined DNA/RNA Molecule: Synthetic oligonucleotide"
cguccacaaaaugauucugtt

SEQ ID NO: 1504 - DNA, 21 bp, Artificial Sequence
  source: /note="Description of Artificial Sequence: Synthetic oligonucleotide"
  source: /note="Description of Combined DNA/RNA Molecule: Synthetic oligonucleotide"
ucguccacaaaaugauucutt

SEQ ID NO: 1505 - DNA, 21 bp, Artificial Sequence
  source: /note="Description of Artificial Sequence: Synthetic oligonucleotide"
  source: /note="Description of Combined DNA/RNA Molecule: Synthetic oligonucleotide"
uucguccacaaaaugauuctt

SEQ ID NO: 1506 - DNA, 21 bp, Artificial Sequence
  source: /note="Description of Artificial Sequence: Synthetic oligonucleotide"
  source: /note="Description of Combined DNA/RNA Molecule: Synthetic oligonucleotide"
auucguccacaaaaugauutt

SEQ ID NO: 1507 - DNA, 21 bp, Artificial Sequence
  source: /note="Description of Artificial Sequence: Synthetic oligonucleotide"
  source: /note="Description of Combined DNA/RNA Molecule: Synthetic oligonucleotide"
uauucguccacaaaaugautt

SEQ ID NO: 1508 - DNA, 21 bp, Artificial Sequence
  source: /note="Description of Artificial Sequence: Synthetic oligonucleotide"
  source: /note="Description of Combined DNA/RNA Molecule: Synthetic oligonucleotide"
auauucguccacaaaaugatt

SEQ ID NO: 1509 - DNA, 21 bp, Artificial Sequence
  source: /note="Description of Artificial Sequence: Synthetic oligonucleotide"
  source: /note="Description of Combined DNA/RNA Molecule: Synthetic oligonucleotide"
cauauucguccacaaaaugtt

SEQ ID NO: 1510 - DNA, 21 bp, Artificial Sequence
  source: /note="Description of Artificial Sequence: Synthetic oligonucleotide"
  source: /note="Description of Combined DNA/RNA Molecule: Synthetic oligonucleotide"
ucauauucguccacaaaautt

SEQ ID NO: 1511 - DNA, 21 bp, Artificial Sequence
  source: /note="Description of Artificial Sequence: Synthetic oligonucleotide"
  source: /note="Description of Combined DNA/RNA Molecule: Synthetic oligonucleotide"
aucauauucguccacaaaatt

SEQ ID NO: 1512 - DNA, 21 bp, Artificial Sequence
  source: /note="Description of Artificial Sequence: Synthetic oligonucleotide"
  source: /note="Description of Combined DNA/RNA Molecule: Synthetic oligonucleotide"
gaucauauucguccacaaatt

SEQ ID NO: 1513 - DNA, 21 bp, Artificial Sequence
  source: /note="Description of Artificial Sequence: Synthetic oligonucleotide"
  source: /note="Description of Combined DNA/RNA Molecule: Synthetic oligonucleotide"
ggaucauauucguccacaatt

SEQ ID NO: 1514 - DNA, 21 bp, Artificial Sequence
  source: /note="Description of Artificial Sequence: Synthetic oligonucleotide"
  source: /note="Description of Combined DNA/RNA Molecule: Synthetic oligonucleotide"
uggaucauauucguccacatt

SEQ ID NO: 1515 - DNA, 21 bp, Artificial Sequence
  source: /note="Description of Artificial Sequence: Synthetic oligonucleotide"
  source: /note="Description of Combined DNA/RNA Molecule: Synthetic oligonucleotide"
uuggaucauauucguccactt

SEQ ID NO: 1516 - DNA, 21 bp, Artificial Sequence
  source: /note="Description of Artificial Sequence: Synthetic oligonucleotide"
  source: /note="Description of Combined DNA/RNA Molecule: Synthetic oligonucleotide"
guuggaucauauucguccatt

SEQ ID NO: 1517 - DNA, 21 bp, Artificial Sequence
  source: /note="Description of Artificial Sequence: Synthetic oligonucleotide"
  source: /note="Description of Combined DNA/RNA Molecule: Synthetic oligonucleotide"
caauuacuacuugcuuccutt

SEQ ID NO: 1518 - DNA, 21 bp, Artificial Sequence
  source: /note="Description of Artificial Sequence: Synthetic oligonucleotide"
  source: /note="Description of Combined DNA/RNA Molecule: Synthetic oligonucleotide"
ucaauuacuacuugcuucctt

SEQ ID NO: 1519 - DNA, 21 bp, Artificial Sequence
  source: /note="Description of Artificial Sequence: Synthetic oligonucleotide"
  source: /note="Description of Combined DNA/RNA Molecule: Synthetic oligonucleotide"
aucaauuacuacuugcuuctt

SEQ ID NO: 1520 - DNA, 21 bp, Artificial Sequence
  source: /note="Description of Artificial Sequence: Synthetic oligonucleotide"
  source: /note="Description of Combined DNA/RNA Molecule: Synthetic oligonucleotide"
caucaauuacuacuugcuutt

SEQ ID NO: 1521 - DNA, 21 bp, Artificial Sequence
  source: /note="Description of Artificial Sequence: Synthetic oligonucleotide"
  source: /note="Description of Combined DNA/RNA Molecule: Synthetic oligonucleotide"
ccaucaauuacuacuugcutt

SEQ ID NO: 1522 - DNA, 21 bp, Artificial Sequence
  source: /note="Description of Artificial Sequence: Synthetic oligonucleotide"
  source: /note="Description of Combined DNA/RNA Molecule: Synthetic oligonucleotide"
uccaucaauuacuacuugctt

SEQ ID NO: 1523 - DNA, 21 bp, Artificial Sequence
  source: /note="Description of Artificial Sequence: Synthetic oligonucleotide"
  source: /note="Description of Combined DNA/RNA Molecule: Synthetic oligonucleotide"
cuccaucaauuacuacuugtt

SEQ ID NO: 1524 - DNA, 21 bp, Artificial Sequence
  source: /note="Description of Artificial Sequence: Synthetic oligonucleotide"
  source: /note="Description of Combined DNA/RNA Molecule: Synthetic oligonucleotide"
ucuccaucaauuacuacuutt

SEQ ID NO: 1525 - DNA, 21 bp, Artificial Sequence
  source: /note="Description of Artificial Sequence: Synthetic oligonucleotide"
  source: /note="Description of Combined DNA/RNA Molecule: Synthetic oligonucleotide"
uucuccaucaauuacuacutt

SEQ ID NO: 1526 - DNA, 21 bp, Artificial Sequence
  source: /note="Description of Artificial Sequence: Synthetic oligonucleotide"
  source: /note="Description of Combined DNA/RNA Molecule: Synthetic oligonucleotide"
uuucuccaucaauuacuactt

SEQ ID NO: 1527 - DNA, 21 bp, Artificial Sequence
  source: /note="Description of Artificial Sequence: Synthetic oligonucleotide"
  source: /note="Description of Combined DNA/RNA Molecule: Synthetic oligonucleotide"
guuucuccaucaauuacuatt

SEQ ID NO: 1528 - DNA, 21 bp, Artificial Sequence
  source: /note="Description of Artificial Sequence: Synthetic oligonucleotide"
  source: /note="Description of Combined DNA/RNA Molecule: Synthetic oligonucleotide"
gguuucuccaucaauuacutt

SEQ ID NO: 1529 - DNA, 21 bp, Artificial Sequence
  source: /note="Description of Artificial Sequence: Synthetic oligonucleotide"
  source: /note="Description of Combined DNA/RNA Molecule: Synthetic oligonucleotide"
agguuucuccaucaauuactt

SEQ ID NO: 1530 - DNA, 21 bp, Artificial Sequence
  source: /note="Description of Artificial Sequence: Synthetic oligonucleotide"
  source: /note="Description of Combined DNA/RNA Molecule: Synthetic oligonucleotide"
cagguuucuccaucaauuatt

SEQ ID NO: 1531 - DNA, 21 bp, Artificial Sequence
  source: /note="Description of Artificial Sequence: Synthetic oligonucleotide"
  source: /note="Description of Combined DNA/RNA Molecule: Synthetic oligonucleotide"
acagguuucuccaucaauutt

SEQ ID NO: 1532 - DNA, 21 bp, Artificial Sequence
  source: /note="Description of Artificial Sequence: Synthetic oligonucleotide"
  source: /note="Description of Combined DNA/RNA Molecule: Synthetic oligonucleotide"
gacagguuucuccaucaautt

SEQ ID NO: 1533 - DNA, 21 bp, Artificial Sequence
  source: /note="Description of Artificial Sequence: Synthetic oligonucleotide"
  source: /note="Description of Combined DNA/RNA Molecule: Synthetic oligonucleotide"
agacagguuucuccaucaatt

SEQ ID NO: 1534 - DNA, 21 bp, Artificial Sequence
  source: /note="Description of Artificial Sequence: Synthetic oligonucleotide"
  source: /note="Description of Combined DNA/RNA Molecule: Synthetic oligonucleotide"
gagacagguuucuccaucatt

SEQ ID NO: 1535 - DNA, 21 bp, Artificial Sequence
  source: /note="Description of Artificial Sequence: Synthetic oligonucleotide"
  source: /note="Description of Combined DNA/RNA Molecule: Synthetic oligonucleotide"
agagacagguuucuccauctt

SEQ ID NO: 1536 - DNA, 21 bp, Artificial Sequence
  source: /note="Description of Artificial Sequence: Synthetic oligonucleotide"
  source: /note="Description of Combined DNA/RNA Molecule: Synthetic oligonucleotide"
aagagacagguuucuccautt

SEQ ID NO: 1537 - DNA, 21 bp, Artificial Sequence
  source: /note="Description of Artificial Sequence: Synthetic oligonucleotide"
  source: /note="Description of Combined DNA/RNA Molecule: Synthetic oligonucleotide"
caagagacagguuucuccatt

SEQ ID NO: 1538 - DNA, 21 bp, Artificial Sequence
  source: /note="Description of Artificial Sequence: Synthetic oligonucleotide"
  source: /note="Description of Combined DNA/RNA Molecule: Synthetic oligonucleotide"
ccaagagacagguuucucctt

SEQ ID NO: 1539 - DNA, 21 bp, Artificial Sequence
  source: /note="Description of Artificial Sequence: Synthetic oligonucleotide"
  source: /note="Description of Combined DNA/RNA Molecule: Synthetic oligonucleotide"
uccaagagacagguuucuctt

SEQ ID NO: 1540 - DNA, 21 bp, Artificial Sequence
  source: /note="Description of Artificial Sequence: Synthetic oligonucleotide"
  source: /note="Description of Combined DNA/RNA Molecule: Synthetic oligonucleotide"
auccaagagacagguuucutt

SEQ ID NO: 1541 - DNA, 21 bp, Artificial Sequence
  source: /note="Description of Artificial Sequence: Synthetic oligonucleotide"
  source: /note="Description of Combined DNA/RNA Molecule: Synthetic oligonucleotide"
uauccaagagacagguuuctt

SEQ ID NO: 1542 - DNA, 21 bp, Artificial Sequence
  source: /note="Description of Artificial Sequence: Synthetic oligonucleotide"
  source: /note="Description of Combined DNA/RNA Molecule: Synthetic oligonucleotide"
auauccaagagacagguuutt

SEQ ID NO: 1543 - DNA, 21 bp, Artificial Sequence
  source: /note="Description of Artificial Sequence: Synthetic oligonucleotide"
  source: /note="Description of Combined DNA/RNA Molecule: Synthetic oligonucleotide"
aauauccaagagacagguutt

SEQ ID NO: 1544 - DNA, 21 bp, Artificial Sequence
  source: /note="Description of Artificial Sequence: Synthetic oligonucleotide"
  source: /note="Description of Combined DNA/RNA Molecule: Synthetic oligonucleotide"
gaauauccaagagacaggutt

SEQ ID NO: 1545 - DNA, 21 bp, Artificial Sequence
  source: /note="Description of Artificial Sequence: Synthetic oligonucleotide"
  source: /note="Description of Combined DNA/RNA Molecule: Synthetic oligonucleotide"
agaauauccaagagacaggtt

SEQ ID NO: 1546 - DNA, 21 bp, Artificial Sequence
  source: /note="Description of Artificial Sequence: Synthetic oligonucleotide"
  source: /note="Description of Combined DNA/RNA Molecule: Synthetic oligonucleotide"
gagaauauccaagagacagtt

SEQ ID NO: 1547 - DNA, 21 bp, Artificial Sequence
  source: /note="Description of Artificial Sequence: Synthetic oligonucleotide"
  source: /note="Description of Combined DNA/RNA Molecule: Synthetic oligonucleotide"
cgagaauauccaagagacatt

SEQ ID NO: 1548 - DNA, 21 bp, Artificial Sequence
  source: /note="Description of Artificial Sequence: Synthetic oligonucleotide"
  source: /note="Description of Combined DNA/RNA Molecule: Synthetic oligonucleotide"
ucgagaauauccaagagactt

SEQ ID NO: 1549 - DNA, 21 bp, Artificial Sequence
  source: /note="Description of Artificial Sequence: Synthetic oligonucleotide"
  source: /note="Description of Combined DNA/RNA Molecule: Synthetic oligonucleotide"
gucgagaauauccaagagatt

SEQ ID NO: 1550 - DNA, 21 bp, Artificial Sequence
  source: /note="Description of Artificial Sequence: Synthetic oligonucleotide"
  source: /note="Description of Combined DNA/RNA Molecule: Synthetic oligonucleotide"
ugucgagaauauccaagagtt

SEQ ID NO: 1551 - DNA, 21 bp, Artificial Sequence
  source: /note="Description of Artificial Sequence: Synthetic oligonucleotide"
  source: /note="Description of Combined DNA/RNA Molecule: Synthetic oligonucleotide"
gugucgagaauauccaagatt

SEQ ID NO: 1552 - DNA, 21 bp, Artificial Sequence
  source: /note="Description of Artificial Sequence: Synthetic oligonucleotide"
  source: /note="Description of Combined DNA/RNA Molecule: Synthetic oligonucleotide"
ugugucgagaauauccaagtt

SEQ ID NO: 1553 - DNA, 21 bp, Artificial Sequence
  source: /note="Description of Artificial Sequence: Synthetic oligonucleotide"
  source: /note="Description of Combined DNA/RNA Molecule: Synthetic oligonucleotide"
ucccucauugcacuguacutt

SEQ ID NO: 1554 - DNA, 21 bp, Artificial Sequence
  source: /note="Description of Artificial Sequence: Synthetic oligonucleotide"
  source: /note="Description of Combined DNA/RNA Molecule: Synthetic oligonucleotide"
gucccucauugcacuguactt

SEQ ID NO: 1555 - DNA, 21 bp, Artificial Sequence
  source: /note="Description of Artificial Sequence: Synthetic oligonucleotide"
  source: /note="Description of Combined DNA/RNA Molecule: Synthetic oligonucleotide"
ggucccucauugcacuguatt

SEQ ID NO: 1556 - DNA, 21 bp, Artificial Sequence
  source: /note="Description of Artificial Sequence: Synthetic oligonucleotide"
  source: /note="Description of Combined DNA/RNA Molecule: Synthetic oligonucleotide"
uggucccucauugcacugutt

SEQ ID NO: 1557 - DNA, 21 bp, Artificial Sequence
  source: /note="Description of Artificial Sequence: Synthetic oligonucleotide"
  source: /note="Description of Combined DNA/RNA Molecule: Synthetic oligonucleotide"
cuggucccucauugcacugtt

SEQ ID NO: 1558 - DNA, 21 bp, Artificial Sequence
  source: /note="Description of Artificial Sequence: Synthetic oligonucleotide"
  source: /note="Description of Combined DNA/RNA Molecule: Synthetic oligonucleotide"
acuggucccucauugcacutt

SEQ ID NO: 1559 - DNA, 21 bp, Artificial Sequence
  source: /note="Description of Artificial Sequence: Synthetic oligonucleotide"
  source: /note="Description of Combined DNA/RNA Molecule: Synthetic oligonucleotide"
uacuggucccucauugcactt

SEQ ID NO: 1560 - DNA, 21 bp, Artificial Sequence
  source: /note="Description of Artificial Sequence: Synthetic oligonucleotide"
  source: /note="Description of Combined DNA/RNA Molecule: Synthetic oligonucleotide"
guacuggucccucauugcatt

SEQ ID NO: 1561 - DNA, 21 bp, Artificial Sequence
  source: /note="Description of Artificial Sequence: Synthetic oligonucleotide"
  source: /note="Description of Combined DNA/RNA Molecule: Synthetic oligonucleotide"
uguacuggucccucauugctt

SEQ ID NO: 1562 - DNA, 21 bp, Artificial Sequence
  source: /note="Description of Artificial Sequence: Synthetic oligonucleotide"
  source: /note="Description of Combined DNA/RNA Molecule: Synthetic oligonucleotide"
auguacuggucccucauugtt

SEQ ID NO: 1563 - DNA, 21 bp, Artificial Sequence
  source: /note="Description of Artificial Sequence: Synthetic oligonucleotide"
  source: /note="Description of Combined DNA/RNA Molecule: Synthetic oligonucleotide"
cauguacuggucccucauutt

SEQ ID NO: 1564 - DNA, 21 bp, Artificial Sequence
  source: /note="Description of Artificial Sequence: Synthetic oligonucleotide"
  source: /note="Description of Combined DNA/RNA Molecule: Synthetic oligonucleotide"
ucauguacuggucccucautt

SEQ ID NO: 1565 - DNA, 21 bp, Artificial Sequence
  source: /note="Description of Artificial Sequence: Synthetic oligonucleotide"
  source: /note="Description of Combined DNA/RNA Molecule: Synthetic oligonucleotide"
cucauguacuggucccucatt

SEQ ID NO: 1566 - DNA, 21 bp, Artificial Sequence
  source: /note="Description of Artificial Sequence: Synthetic oligonucleotide"
  source: /note="Description of Combined DNA/RNA Molecule: Synthetic oligonucleotide"
ccucauguacuggucccuctt

SEQ ID NO: 1567 - DNA, 21 bp, Artificial Sequence
  source: /note="Description of Artificial Sequence: Synthetic oligonucleotide"
  source: /note="Description of Combined DNA/RNA Molecule: Synthetic oligonucleotide"
uccucauguacuggucccutt

SEQ ID NO: 1568 - DNA, 21 bp, Artificial Sequence
  source: /note="Description of Artificial Sequence: Synthetic oligonucleotide"
  source: /note="Description of Combined DNA/RNA Molecule: Synthetic oligonucleotide"
guccucauguacugguccctt

SEQ ID NO: 1569 - DNA, 21 bp, Artificial Sequence
  source: /note="Description of Artificial Sequence: Synthetic oligonucleotide"
  source: /note="Description of Combined DNA/RNA Molecule: Synthetic oligonucleotide"
aguccucauguacuggucctt

SEQ ID NO: 1570 - DNA, 21 bp, Artificial Sequence
  source: /note="Description of Artificial Sequence: Synthetic oligonucleotide"
  source: /note="Description of Combined DNA/RNA Molecule: Synthetic oligonucleotide"
caguccucauguacugguctt

SEQ ID NO: 1571 - DNA, 21 bp, Artificial Sequence
  source: /note="Description of Artificial Sequence: Synthetic oligonucleotide"
  source: /note="Description of Combined DNA/RNA Molecule: Synthetic oligonucleotide"
ccaguccucauguacuggutt

SEQ ID NO: 1572 - DNA, 21 bp, Artificial Sequence
  source: /note="Description of Artificial Sequence: Synthetic oligonucleotide"
  source: /note="Description of Combined DNA/RNA Molecule: Synthetic oligonucleotide"
cccaguccucauguacuggtt

SEQ ID NO: 1573 - DNA, 21 bp, Artificial Sequence
  source: /note="Description of Artificial Sequence: Synthetic oligonucleotide"
  source: /note="Description of Combined DNA/RNA Molecule: Synthetic oligonucleotide"
ccccaguccucauguacugtt

SEQ ID NO: 1574 - DNA, 21 bp, Artificial Sequence
  source: /note="Description of Artificial Sequence: Synthetic oligonucleotide"
  source: /note="Description of Combined DNA/RNA Molecule: Synthetic oligonucleotide"
uccccaguccucauguacutt

SEQ ID NO: 1575 - DNA, 21 bp, Artificial Sequence
  source: /note="Description of Artificial Sequence: Synthetic oligonucleotide"
  source: /note="Description of Combined DNA/RNA Molecule: Synthetic oligonucleotide"
cuccccaguccucauguactt

SEQ ID NO: 1576 - DNA, 21 bp, Artificial Sequence
  source: /note="Description of Artificial Sequence: Synthetic oligonucleotide"
  source: /note="Description of Combined DNA/RNA Molecule: Synthetic oligonucleotide"
ccuccccaguccucauguatt

SEQ ID NO: 1577 - DNA, 21 bp, Artificial Sequence
  source: /note="Description of Artificial Sequence: Synthetic oligonucleotide"
  source: /note="Description of Combined DNA/RNA Molecule: Synthetic oligonucleotide"
cccuccccaguccucaugutt

SEQ ID NO: 1578 - DNA, 21 bp, Artificial Sequence
  source: /note="Description of Artificial Sequence: Synthetic oligonucleotide"
  source: /note="Description of Combined DNA/RNA Molecule: Synthetic oligonucleotide"
gcccuccccaguccucaugtt

SEQ ID NO: 1579 - DNA, 21 bp, Artificial Sequence
  source: /note="Description of Artificial Sequence: Synthetic oligonucleotide"
  source: /note="Description of Combined DNA/RNA Molecule: Synthetic oligonucleotide"
agcccuccccaguccucautt

SEQ ID NO: 1580 - DNA, 21 bp, Artificial Sequence
  source: /note="Description of Artificial Sequence: Synthetic oligonucleotide"
  source: /note="Description of Combined DNA/RNA Molecule: Synthetic oligonucleotide"
aagcccuccccaguccucatt

SEQ ID NO: 1581 - DNA, 21 bp, Artificial Sequence
  source: /note="Description of Artificial Sequence: Synthetic oligonucleotide"
  source: /note="Description of Combined DNA/RNA Molecule: Synthetic oligonucleotide"
aaagcccuccccaguccuctt

SEQ ID NO: 1582 - DNA, 21 bp, Artificial Sequence
  source: /note="Description of Artificial Sequence: Synthetic oligonucleotide"
  source: /note="Description of Combined DNA/RNA Molecule: Synthetic oligonucleotide"
gaaagcccuccccaguccutt

SEQ ID NO: 1583 - DNA, 21 bp, Artificial Sequence
  source: /note="Description of Artificial Sequence: Synthetic oligonucleotide"
  source: /note="Description of Combined DNA/RNA Molecule: Synthetic oligonucleotide"
agaaagcccuccccagucctt

SEQ ID NO: 1584 - DNA, 21 bp, Artificial Sequence
  source: /note="Description of Artificial Sequence: Synthetic oligonucleotide"
  source: /note="Description of Combined DNA/RNA Molecule: Synthetic oligonucleotide"
aagaaagcccuccccaguctt

SEQ ID NO: 1585 - DNA, 21 bp, Artificial Sequence
  source: /note="Description of Artificial Sequence: Synthetic oligonucleotide"
  source: /note="Description of Combined DNA/RNA Molecule: Synthetic oligonucleotide"
aaagaaagcccuccccagutt

SEQ ID NO: 1586 - DNA, 21 bp, Artificial Sequence
  source: /note="Description of Artificial Sequence: Synthetic oligonucleotide"
  source: /note="Description of Combined DNA/RNA Molecule: Synthetic oligonucleotide"
caaagaaagcccuccccagtt

SEQ ID NO: 1587 - DNA, 21 bp, Artificial Sequence
  source: /note="Description of Artificial Sequence: Synthetic oligonucleotide"
  source: /note="Description of Combined DNA/RNA Molecule: Synthetic oligonucleotide"
acaaagaaagcccuccccatt

SEQ ID NO: 1588 - DNA, 21 bp, Artificial Sequence
  source: /note="Description of Artificial Sequence: Synthetic oligonucleotide"
  source: /note="Description of Combined DNA/RNA Molecule: Synthetic oligonucleotide"
uuaguauuauuuauggcaatt

SEQ ID NO: 1589 - DNA, 21 bp, Artificial Sequence
  source: /note="Description of Artificial Sequence: Synthetic oligonucleotide"
  source: /note="Description of Combined DNA/RNA Molecule: Synthetic oligonucleotide"
uuuaguauuauuuauggcatt

SEQ ID NO: 1590 - DNA, 21 bp, Artificial Sequence
  source: /note="Description of Artificial Sequence: Synthetic oligonucleotide"
  source: /note="Description of Combined DNA/RNA Molecule: Synthetic oligonucleotide"
auuuaguauuauuuauggctt

SEQ ID NO: 1591 - DNA, 21 bp, Artificial Sequence
  source: /note="Description of Artificial Sequence: Synthetic oligonucleotide"
  source: /note="Description of Combined DNA/RNA Molecule: Synthetic oligonucleotide"
gauuuaguauuauuuauggtt

SEQ ID NO: 1592 - DNA, 21 bp, Artificial Sequence
  source: /note="Description of Artificial Sequence: Synthetic oligonucleotide"
  source: /note="Description of Combined DNA/RNA Molecule: Synthetic oligonucleotide"
ugauuuaguauuauuuaugtt

SEQ ID NO: 1593 - DNA, 21 bp, Artificial Sequence
  source: /note="Description of Artificial Sequence: Synthetic oligonucleotide"
  source: /note="Description of Combined DNA/RNA Molecule: Synthetic oligonucleotide"
augauuuaguauuauuuautt

SEQ ID NO: 1594 - DNA, 21 bp, Artificial Sequence
  source: /note="Description of Artificial Sequence: Synthetic oligonucleotide"
  source: /note="Description of Combined DNA/RNA Molecule: Synthetic oligonucleotide"
aaugauuuaguauuauuuatt

SEQ ID NO: 1595 - DNA, 21 bp, Artificial Sequence
  source: /note="Description of Artificial Sequence: Synthetic oligonucleotide"
  source: /note="Description of Combined DNA/RNA Molecule: Synthetic oligonucleotide"
aaaugauuuaguauuauuutt

SEQ ID NO: 1596 - DNA, 21 bp, Artificial Sequence
  source: /note="Description of Artificial Sequence: Synthetic oligonucleotide"
  source: /note="Description of Combined DNA/RNA Molecule: Synthetic oligonucleotide"
caaaugauuuaguauuauutt

SEQ ID NO: 1597 - DNA, 21 bp, Artificial Sequence
  source: /note="Description of Artificial Sequence: Synthetic oligonucleotide"
  source: /note="Description of Combined DNA/RNA Molecule: Synthetic oligonucleotide"
ucaaaugauuuaguauuautt

SEQ ID NO: 1598 - DNA, 21 bp, Artificial Sequence
  source: /note="Description of Artificial Sequence: Synthetic oligonucleotide"
  source: /note="Description of Combined DNA/RNA Molecule: Synthetic oligonucleotide"
uucaaaugauuuaguauuatt

SEQ ID NO: 1599 - DNA, 21 bp, Artificial Sequence
  source: /note="Description of Artificial Sequence: Synthetic oligonucleotide"
  source: /note="Description of Combined DNA/RNA Molecule: Synthetic oligonucleotide"
cuucaaaugauuuaguauutt

SEQ ID NO: 1600 - DNA, 21 bp, Artificial Sequence
  source: /note="Description of Artificial Sequence: Synthetic oligonucleotide"
  source: /note="Description of Combined DNA/RNA Molecule: Synthetic oligonucleotide"
ucuucaaaugauuuaguautt

SEQ ID NO: 1601 - DNA, 21 bp, Artificial Sequence
  source: /note="Description of Artificial Sequence: Synthetic oligonucleotide"
  source: /note="Description of Combined DNA/RNA Molecule: Synthetic oligonucleotide"
aucuucaaaugauuuaguatt

SEQ ID NO: 1602 - DNA, 21 bp, Artificial Sequence
  source: /note="Description of Artificial Sequence: Synthetic oligonucleotide"
  source: /note="Description of Combined DNA/RNA Molecule: Synthetic oligonucleotide"
uaucuucaaaugauuuagutt

SEQ ID NO: 1603 - DNA, 21 bp, Artificial Sequence
  source: /note="Description of Artificial Sequence: Synthetic oligonucleotide"
  source: /note="Description of Combined DNA/RNA Molecule: Synthetic oligonucleotide"
auaucuucaaaugauuuagtt

SEQ ID NO: 1604 - DNA, 21 bp, Artificial Sequence
  source: /note="Description of Artificial Sequence: Synthetic oligonucleotide"
  source: /note="Description of Combined DNA/RNA Molecule: Synthetic oligonucleotide"
aauaucuucaaaugauuuatt

SEQ ID NO: 1605 - DNA, 21 bp, Artificial Sequence
  source: /note="Description of Artificial Sequence: Synthetic oligonucleotide"
  source: /note="Description of Combined DNA/RNA Molecule: Synthetic oligonucleotide"
gaauaucuucaaaugauuutt

SEQ ID NO: 1606 - DNA, 21 bp, Artificial Sequence
  source: /note="Description of Artificial Sequence: Synthetic oligonucleotide"
  source: /note="Description of Combined DNA/RNA Molecule: Synthetic oligonucleotide"
ugaauaucuucaaaugauutt

SEQ ID NO: 1607 - DNA, 21 bp, Artificial Sequence
  source: /note="Description of Artificial Sequence: Synthetic oligonucleotide"
  source: /note="Description of Combined DNA/RNA Molecule: Synthetic oligonucleotide"
ggugaauaucuucaaaugatt

SEQ ID NO: 1608 - DNA, 21 bp, Artificial Sequence
  source: /note="Description of Artificial Sequence: Synthetic oligonucleotide"
  source: /note="Description of Combined DNA/RNA Molecule: Synthetic oligonucleotide"
uggugaauaucuucaaaugtt

SEQ ID NO: 1609 - DNA, 21 bp, Artificial Sequence
  source: /note="Description of Artificial Sequence: Synthetic oligonucleotide"
  source: /note="Description of Combined DNA/RNA Molecule: Synthetic oligonucleotide"
auggugaauaucuucaaautt

SEQ ID NO: 1610 - DNA, 21 bp, Artificial Sequence
  source: /note="Description of Artificial Sequence: Synthetic oligonucleotide"
  source: /note="Description of Combined DNA/RNA Molecule: Synthetic oligonucleotide"
aauggugaauaucuucaaatt

SEQ ID NO: 1611 - DNA, 21 bp, Artificial Sequence
  source: /note="Description of Artificial Sequence: Synthetic oligonucleotide"
  source: /note="Description of Combined DNA/RNA Molecule: Synthetic oligonucleotide"
uaauggugaauaucuucaatt

SEQ ID NO: 1612 - DNA, 21 bp, Artificial Sequence
  source: /note="Description of Artificial Sequence: Synthetic oligonucleotide"
  source: /note="Description of Combined DNA/RNA Molecule: Synthetic oligonucleotide"
acucuuuuaauuuguucuctt

SEQ ID NO: 1613 - DNA, 21 bp, Artificial Sequence
  source: /note="Description of Artificial Sequence: Synthetic oligonucleotide"
  source: /note="Description of Combined DNA/RNA Molecule: Synthetic oligonucleotide"
aacucuuuuaauuuguucutt

SEQ ID NO: 1614 - DNA, 21 bp, Artificial Sequence
  source: /note="Description of Artificial Sequence: Synthetic oligonucleotide"
  source: /note="Description of Combined DNA/RNA Molecule: Synthetic oligonucleotide"
uaacucuuuuaauuuguuctt

SEQ ID NO: 1615 - DNA, 21 bp, Artificial Sequence
  source: /note="Description of Artificial Sequence: Synthetic oligonucleotide"
  source: /note="Description of Combined DNA/RNA Molecule: Synthetic oligonucleotide"
uuaacucuuuuaauuuguutt

SEQ ID NO: 1616 - DNA, 21 bp, Artificial Sequence
  source: /note="Description of Artificial Sequence: Synthetic oligonucleotide"
  source: /note="Description of Combined DNA/RNA Molecule: Synthetic oligonucleotide"
cuuaacucuuuuaauuugutt

SEQ ID NO: 1617 - DNA, 21 bp, Artificial Sequence
  source: /note="Description of Artificial Sequence: Synthetic oligonucleotide"
  source: /note="Description of Combined DNA/RNA Molecule: Synthetic oligonucleotide"
ccuuaacucuuuuaauuugtt

SEQ ID NO: 1618 - DNA, 21 bp, Artificial Sequence
  source: /note="Description of Artificial Sequence: Synthetic oligonucleotide"
  source: /note="Description of Combined DNA/RNA Molecule: Synthetic oligonucleotide"
uccuuaacucuuuuaauuutt

SEQ ID NO: 1619 - DNA, 21 bp, Artificial Sequence
  source: /note="Description of Artificial Sequence: Synthetic oligonucleotide"
  source: /note="Description of Combined DNA/RNA Molecule: Synthetic oligonucleotide"
guccuuaacucuuuuaauutt

SEQ ID NO: 1620 - DNA, 21 bp, Artificial Sequence
  source: /note="Description of Artificial Sequence: Synthetic oligonucleotide"
  source: /note="Description of Combined DNA/RNA Molecule: Synthetic oligonucleotide"
aguccuuaacucuuuuaautt

SEQ ID NO: 1621 - DNA, 21 bp, Artificial Sequence
  source: /note="Description of Artificial Sequence: Synthetic oligonucleotide"
  source: /note="Description of Combined DNA/RNA Molecule: Synthetic oligonucleotide"
gaguccuuaacucuuuuaatt

SEQ ID NO: 1622 - DNA, 21 bp, Artificial Sequence
  source: /note="Description of Artificial Sequence: Synthetic oligonucleotide"
  source: /note="Description of Combined DNA/RNA Molecule: Synthetic oligonucleotide"
agaguccuuaacucuuuuatt

SEQ ID NO: 1623 - DNA, 21 bp, Artificial Sequence
  source: /note="Description of Artificial Sequence: Synthetic oligonucleotide"
  source: /note="Description of Combined DNA/RNA Molecule: Synthetic oligonucleotide"
cagaguccuuaacucuuuutt

SEQ ID NO: 1624 - DNA, 21 bp, Artificial Sequence
  source: /note="Description of Artificial Sequence: Synthetic oligonucleotide"
  source: /note="Description of Combined DNA/RNA Molecule: Synthetic oligonucleotide"
ucagaguccuuaacucuuutt

SEQ ID NO: 1625 - DNA, 21 bp, Artificial Sequence
  source: /note="Description of Artificial Sequence: Synthetic oligonucleotide"
  source: /note="Description of Combined DNA/RNA Molecule: Synthetic oligonucleotide"
uucagaguccuuaacucuutt

SEQ ID NO: 1626 - DNA, 21 bp, Artificial Sequence
  source: /note="Description of Artificial Sequence: Synthetic oligonucleotide"
  source: /note="Description of Combined DNA/RNA Molecule: Synthetic oligonucleotide"
ucuucagaguccuuaacuctt

SEQ ID NO: 1627 - DNA, 21 bp, Artificial Sequence
  source: /note="Description of Artificial Sequence: Synthetic oligonucleotide"
  source: /note="Description of Combined DNA/RNA Molecule: Synthetic oligonucleotide"
aucuucagaguccuuaacutt

SEQ ID NO: 1628 - DNA, 21 bp, Artificial Sequence
  source: /note="Description of Artificial Sequence: Synthetic oligonucleotide"
  source: /note="Description of Combined DNA/RNA Molecule: Synthetic oligonucleotide"
caucuucagaguccuuaactt

SEQ ID NO: 1629 - DNA, 21 bp, Artificial Sequence
  source: /note="Description of Artificial Sequence: Synthetic oligonucleotide"
  source: /note="Description of Combined DNA/RNA Molecule: Synthetic oligonucleotide"
acaucuucagaguccuuaatt

SEQ ID NO: 1630 - DNA, 21 bp, Artificial Sequence
  source: /note="Description of Artificial Sequence: Synthetic oligonucleotide"
  source: /note="Description of Combined DNA/RNA Molecule: Synthetic oligonucleotide"
guacaucuucagaguccuutt

SEQ ID NO: 1631 - DNA, 21 bp, Artificial Sequence
  source: /note="Description of Artificial Sequence: Synthetic oligonucleotide"
  source: /note="Description of Combined DNA/RNA Molecule: Synthetic oligonucleotide"
gguacaucuucagaguccutt

SEQ ID NO: 1632 - DNA, 21 bp, Artificial Sequence
  source: /note="Description of Artificial Sequence: Synthetic oligonucleotide"
  source: /note="Description of Combined DNA/RNA Molecule: Synthetic oligonucleotide"
agguacaucuucagagucctt

SEQ ID NO: 1633 - DNA, 21 bp, Artificial Sequence
  source: /note="Description of Artificial Sequence: Synthetic oligonucleotide"
  source: /note="Description of Combined DNA/RNA Molecule: Synthetic oligonucleotide"
uagguacaucuucagaguctt

SEQ ID NO: 1634 - DNA, 21 bp, Artificial Sequence
  source: /note="Description of Artificial Sequence: Synthetic oligonucleotide"
  source: /note="Description of Combined DNA/RNA Molecule: Synthetic oligonucleotide"
auagguacaucuucagagutt

SEQ ID NO: 1635 - DNA, 21 bp, Artificial Sequence
  source: /note="Description of Artificial Sequence: Synthetic oligonucleotide"
  source: /note="Description of Combined DNA/RNA Molecule: Synthetic oligonucleotide"
cauagguacaucuucagagtt

SEQ ID NO: 1636 - DNA, 21 bp, Artificial Sequence
  source: /note="Description of Artificial Sequence: Synthetic oligonucleotide"
  source: /note="Description of Combined DNA/RNA Molecule: Synthetic oligonucleotide"
ccauagguacaucuucagatt

SEQ ID NO: 1637 - DNA, 21 bp, Artificial Sequence
  source: /note="Description of Artificial Sequence: Synthetic oligonucleotide"
  source: /note="Description of Combined DNA/RNA Molecule: Synthetic oligonucleotide"
accauagguacaucuucagtt

SEQ ID NO: 1638 - DNA, 21 bp, Artificial Sequence
  source: /note="Description of Artificial Sequence: Synthetic oligonucleotide"
  source: /note="Description of Combined DNA/RNA Molecule: Synthetic oligonucleotide"
gaccauagguacaucuucatt

SEQ ID NO: 1639 - DNA, 21 bp, Artificial Sequence
  source: /note="Description of Artificial Sequence: Synthetic oligonucleotide"
  source: /note="Description of Combined DNA/RNA Molecule: Synthetic oligonucleotide"
aaucacauuuauuuccuactt

SEQ ID NO: 1640 - DNA, 21 bp, Artificial Sequence
  source: /note="Description of Artificial Sequence: Synthetic oligonucleotide"
  source: /note="Description of Combined DNA/RNA Molecule: Synthetic oligonucleotide"
aaaucacauuuauuuccuatt

SEQ ID NO: 1641 - DNA, 21 bp, Artificial Sequence
  source: /note="Description of Artificial Sequence: Synthetic oligonucleotide"
  source: /note="Description of Combined DNA/RNA Molecule: Synthetic oligonucleotide"
caaaucacauuuauuuccutt

SEQ ID NO: 1642 - DNA, 21 bp, Artificial Sequence
  source: /note="Description of Artificial Sequence: Synthetic oligonucleotide"
  source: /note="Description of Combined DNA/RNA Molecule: Synthetic oligonucleotide"
gcaaaucacauuuauuucctt

SEQ ID NO: 1643 - DNA, 21 bp, Artificial Sequence
  source: /note="Description of Artificial Sequence: Synthetic oligonucleotide"
  source: /note="Description of Combined DNA/RNA Molecule: Synthetic oligonucleotide"
ggcaaaucacauuuauuuctt

SEQ ID NO: 1644 - DNA, 21 bp, Artificial Sequence
  source: /note="Description of Artificial Sequence: Synthetic oligonucleotide"
  source: /note="Description of Combined DNA/RNA Molecule: Synthetic oligonucleotide"
aggcaaaucacauuuauuutt

SEQ ID NO: 1645 - DNA, 21 bp, Artificial Sequence
  source: /note="Description of Artificial Sequence: Synthetic oligonucleotide"
  source: /note="Description of Combined DNA/RNA Molecule: Synthetic oligonucleotide"
aaggcaaaucacauuuauutt

SEQ ID NO: 1646 - DNA, 21 bp, Artificial Sequence
  source: /note="Description of Artificial Sequence: Synthetic oligonucleotide"
  source: /note="Description of Combined DNA/RNA Molecule: Synthetic oligonucleotide"
gaaggcaaaucacauuuautt

SEQ ID NO: 1647 - DNA, 21 bp, Artificial Sequence
  source: /note="Description of Artificial Sequence: Synthetic oligonucleotide"
  source: /note="Description of Combined DNA/RNA Molecule: Synthetic oligonucleotide"
agaaggcaaaucacauuuatt

SEQ ID NO: 1648 - DNA, 21 bp, Artificial Sequence
  source: /note="Description of Artificial Sequence: Synthetic oligonucleotide"
  source: /note="Description of Combined DNA/RNA Molecule: Synthetic oligonucleotide"
uagaaggcaaaucacauuutt

SEQ ID NO: 1649 - DNA, 21 bp, Artificial Sequence
  source: /note="Description of Artificial Sequence: Synthetic oligonucleotide"
  source: /note="Description of Combined DNA/RNA Molecule: Synthetic oligonucleotide"
cuagaaggcaaaucacauutt

SEQ ID NO: 1650 - DNA, 21 bp, Artificial Sequence
  source: /note="Description of Artificial Sequence: Synthetic oligonucleotide"
  source: /note="Description of Combined DNA/RNA Molecule: Synthetic oligonucleotide"
ucuagaaggcaaaucacautt

SEQ ID NO: 1651 - DNA, 21 bp, Artificial Sequence
  source: /note="Description of Artificial Sequence: Synthetic oligonucleotide"
  source: /note="Description of Combined DNA/RNA Molecule: Synthetic oligonucleotide"
uucuagaaggcaaaucacatt

SEQ ID NO: 1652 - DNA, 21 bp, Artificial Sequence
  source: /note="Description of Artificial Sequence: Synthetic oligonucleotide"
  source: /note="Description of Combined DNA/RNA Molecule: Synthetic oligonucleotide"
guucuagaaggcaaaucactt

SEQ ID NO: 1653 - DNA, 21 bp, Artificial Sequence
  source: /note="Description of Artificial Sequence: Synthetic oligonucleotide"
  source: /note="Description of Combined DNA/RNA Molecule: Synthetic oligonucleotide"
uguucuagaaggcaaaucatt

SEQ ID NO: 1654 - DNA, 21 bp, Artificial Sequence
  source: /note="Description of Artificial Sequence: Synthetic oligonucleotide"
  source: /note="Description of Combined DNA/RNA Molecule: Synthetic oligonucleotide"
cuguucuagaaggcaaauctt

SEQ ID NO: 1655 - DNA, 21 bp, Artificial Sequence
  source: /note="Description of Artificial Sequence: Synthetic oligonucleotide"
  source: /note="Description of Combined DNA/RNA Molecule: Synthetic oligonucleotide"
acuguucuagaaggcaaautt

SEQ ID NO: 1656 - DNA, 21 bp, Artificial Sequence
  source: /note="Description of Artificial Sequence: Synthetic oligonucleotide"
  source: /note="Description of Combined DNA/RNA Molecule: Synthetic oligonucleotide"
uacuguucuagaaggcaaatt

SEQ ID NO: 1657 - DNA, 21 bp, Artificial Sequence
  source: /note="Description of Artificial Sequence: Synthetic oligonucleotide"
  source: /note="Description of Combined DNA/RNA Molecule: Synthetic oligonucleotide"
ucuacuguucuagaaggcatt

SEQ ID NO: 1658 - DNA, 21 bp, Artificial Sequence
  source: /note="Description of Artificial Sequence: Synthetic oligonucleotide"
  source: /note="Description of Combined DNA/RNA Molecule: Synthetic oligonucleotide"
gucuacuguucuagaaggctt

SEQ ID NO: 1659 - DNA, 21 bp, Artificial Sequence
  source: /note="Description of Artificial Sequence: Synthetic oligonucleotide"
  source: /note="Description of Combined DNA/RNA Molecule: Synthetic oligonucleotide"
ugucuacuguucuagaaggtt

SEQ ID NO: 1660 - DNA, 21 bp, Artificial Sequence
  source: /note="Description of Artificial Sequence: Synthetic oligonucleotide"
  source: /note="Description of Combined DNA/RNA Molecule: Synthetic oligonucleotide"
gugucuacuguucuagaagtt

SEQ ID NO: 1661 - DNA, 21 bp, Artificial Sequence
  source: /note="Description of Artificial Sequence: Synthetic oligonucleotide"
  source: /note="Description of Combined DNA/RNA Molecule: Synthetic oligonucleotide"
ugugucuacuguucuagaatt

SEQ ID NO: 1662 - DNA, 21 bp, Artificial Sequence
  source: /note="Description of Artificial Sequence: Synthetic oligonucleotide"
  source: /note="Description of Combined DNA/RNA Molecule: Synthetic oligonucleotide"
uugugucuacuguucuagatt

SEQ ID NO: 1663 - DNA, 21 bp, Artificial Sequence
  source: /note="Description of Artificial Sequence: Synthetic oligonucleotide"
  source: /note="Description of Combined DNA/RNA Molecule: Synthetic oligonucleotide"
uuugugucuacuguucuagtt

SEQ ID NO: 1664 - DNA, 21 bp, Artificial Sequence
  source: /note="Description of Artificial Sequence: Synthetic oligonucleotide"
  source: /note="Description of Combined DNA/RNA Molecule: Synthetic oligonucleotide"
uuuugugucuacuguucuatt

SEQ ID NO: 1665 - DNA, 21 bp, Artificial Sequence
  source: /note="Description of Artificial Sequence: Synthetic oligonucleotide"
  source: /note="Description of Combined DNA/RNA Molecule: Synthetic oligonucleotide"
guuuugugucuacuguucutt

SEQ ID NO: 1666 - DNA, 21 bp, Artificial Sequence
  source: /note="Description of Artificial Sequence: Synthetic oligonucleotide"
  source: /note="Description of Combined DNA/RNA Molecule: Synthetic oligonucleotide"
uguuuugugucuacuguuctt

SEQ ID NO: 1667 - DNA, 21 bp, Artificial Sequence
  source: /note="Description of Artificial Sequence: Synthetic oligonucleotide"
  source: /note="Description of Combined DNA/RNA Molecule: Synthetic oligonucleotide"
cuguuuugugucuacuguutt

SEQ ID NO: 1668 - DNA, 21 bp, Artificial Sequence
  source: /note="Description of Artificial Sequence: Synthetic oligonucleotide"
  source: /note="Description of Combined DNA/RNA Molecule: Synthetic oligonucleotide"
ccuguuuugugucuacugutt

SEQ ID NO: 1669 - DNA, 21 bp, Artificial Sequence
  source: /note="Description of Artificial Sequence: Synthetic oligonucleotide"
  source: /note="Description of Combined DNA/RNA Molecule: Synthetic oligonucleotide"
gccuguuuugugucuacugtt

SEQ ID NO: 1670 - DNA, 21 bp, Artificial Sequence
  source: /note="Description of Artificial Sequence: Synthetic oligonucleotide"
  source: /note="Description of Combined DNA/RNA Molecule: Synthetic oligonucleotide"
agccuguuuugugucuacutt

SEQ ID NO: 1671 - DNA, 21 bp, Artificial Sequence
  source: /note="Description of Artificial Sequence: Synthetic oligonucleotide"
  source: /note="Description of Combined DNA/RNA Molecule: Synthetic oligonucleotide"
gagccuguuuugugucuactt

SEQ ID NO: 1672 - DNA, 21 bp, Artificial Sequence
  source: /note="Description of Artificial Sequence: Synthetic oligonucleotide"
  source: /note="Description of Combined DNA/RNA Molecule: Synthetic oligonucleotide"
ugagccuguuuugugucuatt

SEQ ID NO: 1673 - DNA, 21 bp, Artificial Sequence
  source: /note="Description of Artificial Sequence: Synthetic oligonucleotide"
  source: /note="Description of Combined DNA/RNA Molecule: Synthetic oligonucleotide"
cugagccuguuuugugucutt

SEQ ID NO: 1674 - DNA, 21 bp, Artificial Sequence
  source: /note="Description of Artificial Sequence: Synthetic oligonucleotide"
  source: /note="Description of Combined DNA/RNA Molecule: Synthetic oligonucleotide"
ccugagccuguuuuguguctt

SEQ ID NO: 1675 - DNA, 21 bp, Artificial Sequence
  source: /note="Description of Artificial Sequence: Synthetic oligonucleotide"
  source: /note="Description of Combined DNA/RNA Molecule: Synthetic oligonucleotide"
uccugagccuguuuugugutt

SEQ ID NO: 1676 - DNA, 21 bp, Artificial Sequence
  source: /note="Description of Artificial Sequence: Synthetic oligonucleotide"
  source: /note="Description of Combined DNA/RNA Molecule: Synthetic oligonucleotide"
guccugagccuguuuugugtt

SEQ ID NO: 1677 - DNA, 21 bp, Artificial Sequence
  source: /note="Description of Artificial Sequence: Synthetic oligonucleotide"
  source: /note="Description of Combined DNA/RNA Molecule: Synthetic oligonucleotide"
aguccugagccuguuuugutt

SEQ ID NO: 1678 - DNA, 21 bp, Artificial Sequence
  source: /note="Description of Artificial Sequence: Synthetic oligonucleotide"
  source: /note="Description of Combined DNA/RNA Molecule: Synthetic oligonucleotide"
aaguccugagccuguuuugtt

SEQ ID NO: 1679 - DNA, 21 bp, Artificial Sequence
  source: /note="Description of Artificial Sequence: Synthetic oligonucleotide"
  source: /note="Description of Combined DNA/RNA Molecule: Synthetic oligonucleotide"
uaaguccugagccuguuuutt

SEQ ID NO: 1680 - DNA, 21 bp, Artificial Sequence
  source: /note="Description of Artificial Sequence: Synthetic oligonucleotide"
  source: /note="Description of Combined DNA/RNA Molecule: Synthetic oligonucleotide"
cuaaguccugagccuguuutt

SEQ ID NO: 1681 - DNA, 21 bp, Artificial Sequence
  source: /note="Description of Artificial Sequence: Synthetic oligonucleotide"
  source: /note="Description of Combined DNA/RNA Molecule: Synthetic oligonucleotide"
gcuaaguccugagccuguutt

SEQ ID NO: 1682 - DNA, 21 bp, Artificial Sequence
  source: /note="Description of Artificial Sequence: Synthetic oligonucleotide"
  source: /note="Description of Combined DNA/RNA Molecule: Synthetic oligonucleotide"
ugcuaaguccugagccugutt

SEQ ID NO: 1683 - DNA, 21 bp, Artificial Sequence
  source: /note="Description of Artificial Sequence: Synthetic oligonucleotide"
  source: /note="Description of Combined DNA/RNA Molecule: Synthetic oligonucleotide"
uugcuaaguccugagccugtt

SEQ ID NO: 1684 - DNA, 21 bp, Artificial Sequence
  source: /note="Description of Artificial Sequence: Synthetic oligonucleotide"
  source: /note="Description of Combined DNA/RNA Molecule: Synthetic oligonucleotide"
cuugcuaaguccugagccutt

SEQ ID NO: 1685 - DNA, 21 bp, Artificial Sequence
  source: /note="Description of Artificial Sequence: Synthetic oligonucleotide"
  source: /note="Description of Combined DNA/RNA Molecule: Synthetic oligonucleotide"
ucuugcuaaguccugagcctt

SEQ ID NO: 1686 - DNA, 21 bp, Artificial Sequence
  source: /note="Description of Artificial Sequence: Synthetic oligonucleotide"
  source: /note="Description of Combined DNA/RNA Molecule: Synthetic oligonucleotide"
uucuugcuaaguccugagctt

SEQ ID NO: 1687 - DNA, 21 bp, Artificial Sequence
  source: /note="Description of Artificial Sequence: Synthetic oligonucleotide"
  source: /note="Description of Combined DNA/RNA Molecule: Synthetic oligonucleotide"
cuucuugcuaaguccugagtt

SEQ ID NO: 1688 - DNA, 21 bp, Artificial Sequence
  source: /note="Description of Artificial Sequence: Synthetic oligonucleotide"
  source: /note="Description of Combined DNA/RNA Molecule: Synthetic oligonucleotide"
acuucuugcuaaguccugatt

SEQ ID NO: 1689 - DNA, 21 bp, Artificial Sequence
  source: /note="Description of Artificial Sequence: Synthetic oligonucleotide"
  source: /note="Description of Combined DNA/RNA Molecule: Synthetic oligonucleotide"
aacuucuugcuaaguccugtt

SEQ ID NO: 1690 - DNA, 21 bp, Artificial Sequence
  source: /note="Description of Artificial Sequence: Synthetic oligonucleotide"
  source: /note="Description of Combined DNA/RNA Molecule: Synthetic oligonucleotide"
uaacuucuugcuaaguccutt

SEQ ID NO: 1691 - DNA, 21 bp, Artificial Sequence
  source: /note="Description of Artificial Sequence: Synthetic oligonucleotide"
  source: /note="Description of Combined DNA/RNA Molecule: Synthetic oligonucleotide"
auaacuucuugcuaagucctt

SEQ ID NO: 1692 - DNA, 21 bp, Artificial Sequence
  source: /note="Description of Artificial Sequence: Synthetic oligonucleotide"
  source: /note="Description of Combined DNA/RNA Molecule: Synthetic oligonucleotide"
cauaacuucuugcuaaguctt

SEQ ID NO: 1693 - DNA, 21 bp, Artificial Sequence
  source: /note="Description of Artificial Sequence: Synthetic oligonucleotide"
  source: /note="Description of Combined DNA/RNA Molecule: Synthetic oligonucleotide"
ccauaacuucuugcuaagutt

SEQ ID NO: 1694 - DNA, 21 bp, Artificial Sequence
  source: /note="Description of Artificial Sequence: Synthetic oligonucleotide"
  source: /note="Description of Combined DNA/RNA Molecule: Synthetic oligonucleotide"
uccauaacuucuugcuaagtt

SEQ ID NO: 1695 - DNA, 21 bp, Artificial Sequence
  source: /note="Description of Artificial Sequence: Synthetic oligonucleotide"
  source: /note="Description of Combined DNA/RNA Molecule: Synthetic oligonucleotide"
uuccauaacuucuugcuaatt

SEQ ID NO: 1696 - DNA, 21 bp, Artificial Sequence
  source: /note="Description of Artificial Sequence: Synthetic oligonucleotide"
  source: /note="Description of Combined DNA/RNA Molecule: Synthetic oligonucleotide"
auuccauaacuucuugcuatt

SEQ ID NO: 1697 - DNA, 21 bp, Artificial Sequence
  source: /note="Description of Artificial Sequence: Synthetic oligonucleotide"
  source: /note="Description of Combined DNA/RNA Molecule: Synthetic oligonucleotide"
aauuccauaacuucuugcutt

SEQ ID NO: 1698 - DNA, 21 bp, Artificial Sequence
  source: /note="Description of Artificial Sequence: Synthetic oligonucleotide"
  source: /note="Description of Combined DNA/RNA Molecule: Synthetic oligonucleotide"
gaauuccauaacuucuugctt

SEQ ID NO: 1699 - DNA, 21 bp, Artificial Sequence
  source: /note="Description of Artificial Sequence: Synthetic oligonucleotide"
  source: /note="Description of Combined DNA/RNA Molecule: Synthetic oligonucleotide"
ggaauuccauaacuucuugtt

SEQ ID NO: 1700 - DNA, 21 bp, Artificial Sequence
  source: /note="Description of Artificial Sequence: Synthetic oligonucleotide"
  source: /note="Description of Combined DNA/RNA Molecule: Synthetic oligonucleotide"
aggaauuccauaacuucuutt

SEQ ID NO: 1701 - DNA, 21 bp, Artificial Sequence
  source: /note="Description of Artificial Sequence: Synthetic oligonucleotide"
  source: /note="Description of Combined DNA/RNA Molecule: Synthetic oligonucleotide"
aaggaauuccauaacuucutt

SEQ ID NO: 1702 - DNA, 21 bp, Artificial Sequence
  source: /note="Description of Artificial Sequence: Synthetic oligonucleotide"
  source: /note="Description of Combined DNA/RNA Molecule: Synthetic oligonucleotide"
aaaggaauuccauaacuuctt

SEQ ID NO: 1703 - DNA, 21 bp, Artificial Sequence
  source: /note="Description of Artificial Sequence: Synthetic oligonucleotide"
  source: /note="Description of Combined DNA/RNA Molecule: Synthetic oligonucleotide"
aaaaggaauuccauaacuutt

SEQ ID NO: 1704 - DNA, 21 bp, Artificial Sequence
  source: /note="Description of Artificial Sequence: Synthetic oligonucleotide"
  source: /note="Description of Combined DNA/RNA Molecule: Synthetic oligonucleotide"
uaaaaggaauuccauaacutt

SEQ ID NO: 1705 - DNA, 21 bp, Artificial Sequence
  source: /note="Description of Artificial Sequence: Synthetic oligonucleotide"
  source: /note="Description of Combined DNA/RNA Molecule: Synthetic oligonucleotide"
auaaaaggaauuccauaactt

SEQ ID NO: 1706 - DNA, 21 bp, Artificial Sequence
  source: /note="Description of Artificial Sequence: Synthetic oligonucleotide"
  source: /note="Description of Combined DNA/RNA Molecule: Synthetic oligonucleotide"
aauaaaaggaauuccauaatt

SEQ ID NO: 1707 - DNA, 21 bp, Artificial Sequence
  source: /note="Description of Artificial Sequence: Synthetic oligonucleotide"
  source: /note="Description of Combined DNA/RNA Molecule: Synthetic oligonucleotide"
caauaaaaggaauuccauatt

SEQ ID NO: 1708 - DNA, 21 bp, Artificial Sequence
  source: /note="Description of Artificial Sequence: Synthetic oligonucleotide"
  source: /note="Description of Combined DNA/RNA Molecule: Synthetic oligonucleotide"
ucaauaaaaggaauuccautt

SEQ ID NO: 1709 - DNA, 5312 bp, Macaca fascicularis
  modified_base (1)..(112): a, c, t, g, unknown or other
  modified_base (171)..(204): a, c, t, g, unknown or other
  modified_base (241)..(246): a, c, t, g, unknown or other
  modified_base (1022)..(1076): a, c, t, g, unknown or other
  modified_base (1199)..(1224): a, c, t, g, unknown or other
  modified_base (1333)..(1365): a, c, t, g, unknown or other
  modified_base (1490)..(1529): a, c, t, g, unknown or other
  modified_base (2035)..(2053): a, c, t, g, unknown or other
  modified_base (2128)..(2183): a, c, t, g, unknown or other
  modified_base (2255)..(2256): a, c, t, g, unknown or other
  modified_base (2341)..(2370): a, c, t, g, unknown or other
  modified_base (2674)..(2721): a, c, t, g, unknown or other
  modified_base (2978)..(3052): a, c, t, g, unknown or other
  modified_base (3164)..(3164): a, c, t, g, unknown or other
  modified_base (3263)..(3265): a, c, t, g, unknown or other
  modified_base (3407)..(3484): a, c, t, g, unknown or other
  modified_base (3539)..(3642): a, c, t, g, unknown or other
  modified_base (3685)..(3718): a, c, t, g, unknown or other
  modified_base (3827)..(3838): a, c, t, g, unknown or other
  modified_base (4007)..(4008): a, c, t, g, unknown or other
  modified_base (4107)..(4113): a, c, t, g, unknown or other
  modified_base (4487)..(4502): a, c, t, g, unknown or other
  modified_base (4658)..(4698): a, c, t, g, unknown or other
  modified_base (5309)..(5312): a, c, t, g, unknown or other
nnnnnnnnnnnnnnnnnnnnnnnnnnnnnnnnnnnnnnnnnnnnnnnnnnnnnnnnnnnnnnnnnnnnnnnnnnnnnnnnnnnnnnnnnnnnnnnnnnnnnnnnnnnnnnnnaggcactgaaggcggcggcggggccagaggctcagcggctccccggggcgggagagagnnnnnnnnnnnnnnnnnnnnnnnnnnnnnnnnnnagttggagctggtggggtaggcaagagtgccttgacnnnnnngctaattcagaatcattttgtggacgaatatgatccaacaatagaggattcctacaggaagcaagtagtaattgatggagaaacctgtctcttggatattctcgacacagcaggtcaagaggagtacagtgcaatgagggaccagtacatgaggactggggagggctttctttgtgtatttgccataaataatactaaatcatttgaagatattcaccattatagagaacaaattaaaagagttaaggactctgaagatgtacctatggtcctagtaggaaataaatgtgatttgccttctagaacagtagacacaaaacaggctcaggacttagcaagaagttacggaattccttttattgaaacatcagcaaagacaagacagggtgttgatgatgccttctatacattagttcgagaaattcgaaaacataaagaaaagatgagcaaagatggtaaaaagaagaaaaagaagtcaaagacaaagtgtgtaattatgtaaatacaatttgtacttttttcttaaggcatactagtaaaagtggtaatttttgtacattacactaaattattagcatttgttttagcattacctaatttttttcctgctccatgcagactgttagcttttaccttaaatgcttattttaaaatgacagtggaagcttttttttcctctaagtgccagtattcccagagttttgatttttgaactagcaatgcctgtgaaaaagaaactgaatacctaagatttctgtcttggggtttttggtgcnnnnnnnnnnnnnnnnnnnnnnnnnnnnnnnnnnnnnnnnnnnnnnnnnnnnnnnaattaatgaagcttctgaatcatccctattctgtgttttatctagtcacataaatggattaattactaatttcagttgagaccttctaattggtttttactgaaacattgagggaacacaaannnnnnnnnnnnnnnnnnnnnnnnnntctaggcatcatgtcctatagtttgtcatccctgatgaatgtaaagttacactgttcacaaaggttttgttccctttccactgctattagtcatggtcactctccccgnnnnnnnnnnnnnnnnnnnnnnnnnnnnnnnnntggaaaaaaattacaagtcaatggaaactattataaggccgtttccttttcacattagataaattactataaagactcctaatagcttttcctgttaaggcagacccagtatgaaatggggattnnnnnnnnnnnnnnnnnnnnnnnnnnnnnnnnnnnnnnnnaatttttataataattgaaataattttaacatgtataaaaaattctcataggaattaaatgtagtctccctgtgtcagattgctctttcatagtataactttaaatcttttcttcaacttcagtctttgaaggtagttttaattctgcttgtgacattaaaagattatttgggccagttatagcttagtaggtgttgaagagaccaaggttgcatggccaggccctgtgtgaacctttgagctttcatagagagtttcacagcatggactgtgtccccatggtcatccagtgttgtcatgcattggttagtcaaaatggggagggactaggacagtttggataggtcaacaagatacattctcactctgtggtggtcctgctgacaaatcaagagcattgcttttgttttttaagaaaatgaactcttttttaaaaattacttttaaatattaactcaaaagttgagattttgggggggtggtatgccaagacattaatttttttnnnnnnnnnnnnnnnnnnnaagttttacaatctctaggtttggctagttctcttaacactggttaaattaacatttcataaacacttttcaagnnnnnnnnnnnnnnnnnnnnnnnnnnnnnnnnnnnnnnnnnnnnnnnnnnnnnnnnatttaaaatgttacttattttaaaatatatgaaatgagatggcatggtgaggtgaaagtatcactggactannaagaaggtgacttaggttctagatagttgtcttttaggactctgattttgaggacatcacttactatccatttcttcatgttaannnnnnnnnnnnnnnnnnnnnnnnnnnnnntttttacaactatgtgatttatattccgtttacatgaggatacacttatttgtcaagctcagcacaatctaaaaatttttaacctatgttacaccatcttcagtgccaatcttgggcaaaattgtgcaagaggtgaagtttatatttgaatatccattctcgttttaggactctccttccatgttagtgtcatcttgcctgcctaccttccacatgccccatgacttgatgcagttttaatacttctaattcccctaaccataagatttactgctgctatggatatctccatgaagttttcccnnnnnnnnnnnnnnnnnnnnnnnnnnnnnnnnnnnnnnnnnnnnnnnngagaatctgacagataccataatgggatttgacctaatcactaattttcaggtggtggccgatcctttgaaaatatctctgctgcccaatccattagcgacagtaggatttttcagacctggtatgaatagacagaaccctatccagtggaaggagaatttaataaagatagtactgaaataattcctaaggtaatctacaactaggactactcctggtaacagtaatacattccattgttttagtaaccagaaatnnnnnnnnnnnnnnnnnnnnnnnnnnnnnnnnnnnnnnnnnnnnnnnnnnnnnnnnnnnnnnnnnnnnnnnnnnnccaggctggaatgcagtggcgccatctcagctcactgcaacctccatctcccaggttcaagcgattctcgtgcctcggcatcctgagtagctgggattacaggcatgtgccnccacactcaactaatttttgtagttttaggagagacagggtttcaccctattggccaggctggtctcgaactcctgacctcaagtgattcacccacctnnncctcataaagccgttttgcagaactcatttattcagcaaatatttattgagtgcctaccagatgccagtcatttcacaaggcactgggtatatggtatccccaaacaagagacataatcctggtccttagctagtgctagcnnnnnnnnnnnnnnnnnnnnnnnnnnnnnnnnnnnnnnnnnnnnnnnnnnnnnnnnnnnnnnnnnnnnnnnnnnnnnnggggtttggtccctgtgcctgctctataattgttttgctatgattccagtgaaannnnnnnnnnnnnnnnnnnnnnnnnnnnnnnnnnnnnnnnnnnnnnnnnnnnnnnnnnnnnnnnnnnnnnnnnnnnnnnnnnnnnnnnnnnnnnnnnnnnnnnnttactgtacacattaaggtgtatgtcagatatccatattgaannnnnnnnnnnnnnnnnnnnnnnnnnnnnnnnnnataattaaaatatacttaaaaattaatagttttatctgggtacaaacaaacaggtgcctgaactagttcacagacaaggaaacttctatgtaaaaatcagtatgatttnnnnnnnnnnnngtgaaactacagatctttggaacattgtttagatagggtgttaagacttacacagtaccacgtttctacacacagaaagaaatggccatacttcaggaactgcagtgctaatgaggggatatttaggcctcttgaatttttgatgtagatgggcatttttttaaggtanntggtaattacctttatgtgaactttgaatggtttaacaaaagatttgtttttgtagagattttaaagggggagaatgctagaaataaatgttatctaannnnnnncgccttaaagataaaaatccttgttgaagttttttaaaaaaaagctaaattacatagtcttaggcattaacatgtttgtggaagaatatagcacacatatattgtatcatttgagtgaatattcccaaataggcattctaggctctatttaactgagtcacactgcataggaatttagaacctaacttttataggttatcaaaactgttgcctccattgcacaattttgtcctaatacatacatggagactttgtggggcatgttaagttacagtttgcacaagttcatctcatttgtattccattgattttttttttcttctaaacattttttcttcaaacagtatataactttttttaggggattttttttnnnnnnnnnnnnnnnntctgacgatttccatttgtcaaaaagtaatgatttcttgataattatgtagtaatgtttttaagaacccagcagttaccttaaagctgaatttatatttaataacttctgtgttaatactggatagcatgaattctgcattgagaaactgaatagnnnnnnnnnnnnnnnnnnnnnnnnnnnnnnnnnnnnnnnnncatgagttcttgaagaatagtcataactagattaagatctgtgttttagtttaatagtttgaagtgcctgtttgggataatgataggtaatttagatgaatttagggggaaaaaaagttatctgcagaaatgttgagggcccatctctccccacacacccacatagagctaactgggttacagtgttttatccgaaagtttccaattccactgtcttgtgttttcatgttgaaaatacttttgcatttttcctttgagtgccaatttcttactagtactatttcttaatgtaacatgtttacctggaatgtattttaactatttttgtatagtgtaaactgaaacatgcacattttgtacattgtgctttcttttgtgggacatatgcagtgtgatccagttgttttccatcatttggttgcgctgacctaggaatgttggtcatatcaaacattaaaaatgaccactcttttaattgaaattaacttttaaatgtttataggagtatgtgctgtgaagtgatctaaaatttgtaatatttttgtcatgaactgtactactcctaattattgtaatgtaataaaaatagttacagtgacaaaaaaaaaaannnn

SEQ ID NO: 1710 - DNA, 2015 bp, Homo sapiens
aggcactgaaggcggcggcggggccagaggctcagcggctcccaggtgcgggagagaggcctgctgaaaatgactgaatataaacttgtggtagttggagctggtggcgtaggcaagagtgccttgacgatacagctaattcagaatcattttgtggacgaatatgatccaacaatagaggattcctacaggaagcaagtagtaattgatggagaaacctgtctcttggatattctcgacacagcaggtcaagaggagtacagtgcaatgagggaccagtacatgaggactggggagggctttctttgtgtatttgccataaataatactaaatcatttgaagatattcaccattatagagaacaaattaaaagagttaaggactctgaagatgtacctatggtcctagtaggaaataaatgtgatttgccttctagaacagtagacacaaaacaggctcaggacttagcaagaagttatggaattccttttattgaaacatcagcaaagacaagacagggtgttgatgatgccttctatacattagttcgagaaattcgaaaacataaagaaaagatgagcaaagatggtaaaaagaagaaaaagaagtcaaagacaaagtgtgtaattatgtaaatacaatttgtacttttttcttaaggcatactagtacaagtggtaatttttgtacattacactaaattattagcatttgttttagcattacctaatttttttcctgctccatgcagactgttagcttttaccttaaatgcttattttaaaatgacagtggaagtttttttttcctctaagtgccagtattcccagagttttggtttttgaactagcaatgcctgtgaaaaagaaactgaatacctaagatttctgtcttggggtttttggtgcatgcagttgattacttcttatttttcttaccaattgtgaatgttggtgtgaaacaaattaatgaagcttttgaatcatccctattctgtgttttatctagtcacataaatggattaattactaatttcagttgagaccttctaattggtttttactgaaacattgagggaacacaaatttatgggcttcctgatgatgattcttctaggcatcatgtcctatagtttgtcatccctgatgaatgtaaagttacactgttcacaaaggttttgtctcctttccactgctattagtcatggtcactctccccaaaatattatattttttctataaaaagaaaaaaatggaaaaaaattacaaggcaatggaaactattataaggccatttccttttcacattagataaattactataaagactcctaatagcttttcctgttaaggcagacccagtatgaaatggggattattatagcaaccattttggggctatatttacatgctactaaatttttataataattgaaaagattttaacaagtataaaaaattctcataggaattaaatgtagtctccctgtgtcagactgctctttcatagtataactttaaatcttttcttcaacttgagtctttgaagatagttttaattctgcttgtgacattaaaagattatttgggccagttatagcttattaggtgttgaagagaccaaggttgcaaggccaggccctgtgtgaacctttgagctttcatagagagtttcacagcatggactgtgtccccacggtcatccagtgttgtcatgcattggttagtcaaaatggggagggactagggcagtttggatagctcaacaagatacaatctcactctgtggtggtcctgctgacaaatcaagagcattgcttttgtttcttaagaaaacaaactcttttttaaaaattacttttaaatattaactcaaaagttgagattttggggtggtggtgtgccaagacattaattttttttttaaacaatgaagtgaaaaagttttacaatctctaggtttggctagttctcttaacactggttaaattaacattgcataaacacttttcaag

SEQ ID NO: 1711 - DNA, 2015 bp, Macaca fascicularis
  modified_base (59)..(92): a, c, t, g, unknown or other
  modified_base (129)..(134): a, c, t, g, unknown or other
  modified_base (910)..(964): a, c, t, g, unknown or other
  modified_base (1087)..(1112): a, c, t, g, unknown or other
  modified_base (1221)..(1253): a, c, t, g, unknown or other
  modified_base (1378)..(1417): a, c, t, g, unknown or other
  modified_base (1923)..(1941): a, c, t, g, unknown or other
aggcactgaaggcggcggcggggccagaggctcagcggctccccggggcgggagagagnnnnnnnnnnnnnnnnnnnnnnnnnnnnnnnnnnagttggagctggtggggtaggcaagagtgccttgacnnnnnngctaattcagaatcattttgtggacgaatatgatccaacaatagaggattcctacaggaagcaagtagtaattgatggagaaacctgtctcttggatattctcgacacagcaggtcaagaggagtacagtgcaatgagggaccagtacatgaggactggggagggctttctttgtgtatttgccataaataatactaaatcatttgaagatattcaccattatagagaacaaattaaaagagttaaggactctgaagatgtacctatggtcctagtaggaaataaatgtgatttgccttctagaacagtagacacaaaacaggctcaggacttagcaagaagttacggaattccttttattgaaacatcagcaaagacaagacagggtgttgatgatgccttctatacattagttcgagaaattcgaaaacataaagaaaagatgagcaaagatggtaaaaagaagaaaaagaagtcaaagacaaagtgtgtaattatgtaaatacaatttgtacttttttcttaaggcatactagtaaaagtggtaatttttgtacattacactaaattattagcatttgttttagcattacctaatttttttcctgctccatgcagactgttagcttttaccttaaatgcttattttaaaatgacagtggaagcttttttttcctctaagtgccagtattcccagagttttgatttttgaactagcaatgcctgtgaaaaagaaactgaatacctaagatttctgtcttggggtttttggtgcnnnnnnnnnnnnnnnnnnnnnnnnnnnnnnnnnnnnnnnnnnnnnnnnnnnnnnnaattaatgaagcttctgaatcatccctattctgtgttttatctagtcacataaatggattaattactaatttcagttgagaccttctaattggtttttactgaaacattgagggaacacaaannnnnnnnnnnnnnnnnnnnnnnnnntctaggcatcatgtcctatagtttgtcatccctgatgaatgtaaagttacactgttcacaaaggttttgttccctttccactgctattagtcatggtcactctccccgnnnnnnnnnnnnnnnnnnnnnnnnnnnnnnnnntggaaaaaaattacaagtcaatggaaactattataaggccgtttccttttcacattagataaattactataaagactcctaatagcttttcctgttaaggcagacccagtatgaaatggggattnnnnnnnnnnnnnnnnnnnnnnnnnnnnnnnnnnnnnnnnaatttttataataattgaaataattttaacatgtataaaaaattctcataggaattaaatgtagtctccctgtgtcagattgctctttcatagtataactttaaatcttttcttcaacttcagtctttgaaggtagttttaattctgcttgtgacattaaaagattatttgggccagttatagcttagtaggtgttgaagagaccaaggttgcatggccaggccctgtgtgaacctttgagctttcatagagagtttcacagcatggactgtgtccccatggtcatccagtgttgtcatgcattggttagtcaaaatggggagggactaggacagtttggataggtcaacaagatacattctcactctgtggtggtcctgctgacaaatcaagagcattgcttttgttttttaagaaaatgaactcttttttaaaaattacttttaaatattaactcaaaagttgagattttgggggggtggtatgccaagacattaatttttttnnnnnnnnnnnnnnnnnnnaagttttacaatctctaggtttggctagttctcttaacactggttaaattaacatttcataaacacttttcaag

SEQ ID NO: 1712 - DNA, 794 bp, Homo sapiens
atttaaaatgttacttattttaaaataaatgaagtgagatggcatggtgaggtgaaagtatcactggactaggaagaaggtgacttaggttctagataggtgtcttttaggactctgattttgaggacatcacttactatccatttcttcatgttaaaagaagtcatctcaaactcttagttttttttttttacaactatgtaatttatattccatttacataaggatacacttatttgtcaagctcagcacaatctgtaaatttttaacctatgttacaccatcttcagtgccagtcttgggcaaaattgtgcaagaggtgaagtttatatttgaatatccattctcgttttaggactcttcttccatattagtgtcatcttgcctccctaccttccacatgccccatgacttgatgcagttttaatacttgtaattcccctaaccataagatttactgctgctgtggatatctccatgaagttttcccactgagtcacatcagaaatgccctacatcttatttcctcagggctcaagagaatctgacagataccataaagggatttgacctaatcactaattttcaggtggtggctgatgctttgaacatctctttgctgcccaatccattagcgacagtaggatttttcaaacctggtatgaatagacagaaccctatccagtggaaggagaatttaataaagatagtgctgaaagaattccttaggtaatctataactaggactactcctggtaacagtaatacattccattgttttagtaaccagaaat

SEQ ID NO: 1713 - DNA, 794 bp, Macaca fascicularis
  modified_base (72)..(73): a, c, t, g, unknown or other
  modified_base (158)..(187): a, c, t, g, unknown or other
  modified_base (491)..(538): a, c, t, g, unknown or other
atttaaaatgttacttattttaaaatatatgaaatgagatggcatggtgaggtgaaagtatcactggactannaagaaggtgacttaggttctagatagttgtcttttaggactctgattttgaggacatcacttactatccatttcttcatgttaannnnnnnnnnnnnnnnnnnnnnnnnnnnnntttttacaactatgtgatttatattccgtttacatgaggatacacttatttgtcaagctcagcacaatctaaaaatttttaacctatgttacaccatcttcagtgccaatcttgggcaaaattgtgcaagaggtgaagtttatatttgaatatccattctcgttttaggactctccttccatgttagtgtcatcttgcctgcctaccttccacatgccccatgacttgatgcagttttaatacttctaattcccctaaccataagatttactgctgctatggatatctccatgaagttttcccnnnnnnnnnnnnnnnnnnnnnnnnnnnnnnnnnnnnnnnnnnnnnnnngagaatctgacagataccataatgggatttgacctaatcactaattttcaggtggtggccgatcctttgaaaatatctctgctgcccaatccattagcgacagtaggatttttcagacctggtatgaatagacagaaccctatccagtggaaggagaatttaataaagatagtactgaaataattcctaaggtaatctacaactaggactactcctggtaacagtaatacattccattgttttagtaaccagaaat

SEQ ID NO: 1714 - DNA, 1666 bp, Homo sapiens
ttactgtacacattaaggtgtatgtcagatattcatattgacccaaatgtgtaatattccagttttctctgcataagtaattaaaatatacttaaaaattaatagttttatctgggtacaaataaacaggtgcctgaactagttcacagacaaggaaacttctatgtaaaaatcactatgatttctgaattgctatgtgaaactacagatctttggaacactgtttaggtagggtgttaagacttacacagtacctcgtttctacacagagaaagaaatggccatacttcaggaactgcagtgcttatgaggggatatttaggcctcttgaatttttgatgtagatgggcatttttttaaggtagtggttaattacctttatgtgaactttgaatggtttaacaaaagatttgtttttgtagagattttaaagggggagaattctagaaataaatgttacctaattattacagccttaaagacaaaaatccttgttgaagtttttttaaaaaaagctaaattacatagacttaggcattaacatgtttgtggaagaatatagcagacgtatattgtatcatttgagtgaatgttcccaagtaggcattctaggctctatttaactgagtcacactgcataggaatttagaacctaacttttataggttatcaaaactgttgtcaccattgcacaattttgtcctaatatatacatagaaactttgtggggcatgttaagttacagtttgcacaagttcatctcatttgtattccattgattttttttttcttctaaacattttttcttcaaacagtatataactttttttaggggatttttttttagacagcaaaaactatctgaagatttccatttgtcaaaaagtaatgatttcttgataattgtgtagtaatgttttttagaacccagcagttaccttaaagctgaatttatatttagtaacttctgtgttaatactggatagcatgaattctgcattgagaaactgaatagctgtcataaaatgaaactttctttctaaagaaagatactcacatgagttcttgaagaatagtcataactagattaagatctgtgttttagtttaatagtttgaagtgcctgtttgggataatgataggtaatttagatgaatttaggggaaaaaaaagttatctgcagatatgttgagggcccatctctccccccacacccccacagagctaactgggttacagtgttttatccgaaagtttccaattccactgtcttgtgttttcatgttgaaaatacttttgcatttttcctttgagtgccaatttcttactagtactatttcttaatgtaacatgtttacctggaatgtattttaactatttttgtatagtgtaaactgaaacatgcacattttgtacattgtgctttcttttgtgggacatatgcagtgtgatccagttgttttccatcatttggttgcgctgacctaggaatgttggtcatatcaaacattaaaaatgaccactcttttaattgaaattaacttttaaatgtttataggagtatgtgctgtgaagtgatctaaaatttgtaatatttttgtcatgaactgtactactcctaattattgtaatgtaataaaaatagttacagtgacaaaaaaaaaaa

SEQ ID NO: 1715 - DNA, 1666 bp, Macaca fascicularis
  modified_base (43)..(76): a, c, t, g, unknown or other
  modified_base (185)..(196): a, c, t, g, unknown or other
  modified_base (365)..(366): a, c, t, g, unknown or other
  modified_base (465)..(471): a, c, t, g, unknown or other
  modified_base (845)..(860): a, c, t, g, unknown or other
  modified_base (1016)..(1056): a, c, t, g, unknown or other
ttactgtacacattaaggtgtatgtcagatatccatattgaannnnnnnnnnnnnnnnnnnnnnnnnnnnnnnnnnataattaaaatatacttaaaaattaatagttttatctgggtacaaacaaacaggtgcctgaactagttcacagacaaggaaacttctatgtaaaaatcagtatgatttnnnnnnnnnnnngtgaaactacagatctttggaacattgtttagatagggtgttaagacttacacagtaccacgtttctacacacagaaagaaatggccatacttcaggaactgcagtgctaatgaggggatatttaggcctcttgaatttttgatgtagatgggcatttttttaaggtanntggtaattacctttatgtgaactttgaatggtttaacaaaagatttgtttttgtagagattttaaagggggagaatgctagaaataaatgttatctaannnnnnncgccttaaagataaaaatccttgttgaagttttttaaaaaaaagctaaattacatagtcttaggcattaacatgtttgtggaagaatatagcacacatatattgtatcatttgagtgaatattcccaaataggcattctaggctctatttaactgagtcacactgcataggaatttagaacctaacttttataggttatcaaaactgttgcctccattgcacaattttgtcctaatacatacatggagactttgtggggcatgttaagttacagtttgcacaagttcatctcatttgtattccattgattttttttttcttctaaacattttttcttcaaacagtatataactttttttaggggattttttttnnnnnnnnnnnnnnnntctgacgatttccatttgtcaaaaagtaatgatttcttgataattatgtagtaatgtttttaagaacccagcagttaccttaaagctgaatttatatttaataacttctgtgttaatactggatagcatgaattctgcattgagaaactgaatagnnnnnnnnnnnnnnnnnnnnnnnnnnnnnnnnnnnnnnnnncatgagttcttgaagaatagtcataactagattaagatctgtgttttagtttaatagtttgaagtgcctgtttgggataatgataggtaatttagatgaatttagggggaaaaaaagttatctgcagaaatgttgagggcccatctctccccacacacccacatagagctaactgggttacagtgttttatccgaaagtttccaattccactgtcttgtgttttcatgttgaaaatacttttgcatttttcctttgagtgccaatttcttactagtactatttcttaatgtaacatgtttacctggaatgtattttaactatttttgtatagtgtaaactgaaacatgcacattttgtacattgtgctttcttttgtgggacatatgcagtgtgatccagttgttttccatcatttggttgcgctgacctaggaatgttggtcatatcaaacattaaaaatgaccactcttttaattgaaattaacttttaaatgtttataggagtatgtgctgtgaagtgatctaaaatttgtaatatttttgtcatgaactgtactactcctaattattgtaatgtaataaaaatagttacagtgacaaaaaaaaaaa

SEQ ID NO: 1716 - DNA, 19 bp, Artificial Sequence
  source: /note="Description of Artificial Sequence: Synthetic oligonucleotide"
acttgtggtagttggagct

SEQ ID NO: 1717 - DNA, 19 bp, Artificial Sequence
  source: /note="Description of Artificial Sequence: Synthetic oligonucleotide"
gcaagagtgccttgacgat

SEQ ID NO: 1718 - DNA, 19 bp, Artificial Sequence
  source: /note="Description of Artificial Sequence: Synthetic oligonucleotide"
caagagtgccttgacgata

SEQ ID NO: 1719 - DNA, 19 bp, Artificial Sequence
  source: /note="Description of Artificial Sequence: Synthetic oligonucleotide"
ccttgacgatacagctaat

SEQ ID NO: 1720 - DNA, 19 bp, Artificial Sequence
  source: /note="Description of Artificial Sequence: Synthetic oligonucleotide"
cagctaattcagaatcatt

SEQ ID NO: 1721 - DNA, 19 bp, Artificial Sequence
  source: /note="Description of Artificial Sequence: Synthetic oligonucleotide"
cgaatatgatccaacaata

SEQ ID NO: 1722 - DNA, 19 bp, Artificial Sequence
  source: /note="Description of Artificial Sequence: Synthetic oligonucleotide"
ggaagcaagtagtaattga

SEQ ID NO: 1723 - DNA, 19 bp, Artificial Sequence
  source: /note="Description of Artificial Sequence: Synthetic oligonucleotide"
gaagcaagtagtaattgat

SEQ ID NO: 1724 - DNA, 19 bp, Artificial Sequence
  source: /note="Description of Artificial Sequence: Synthetic oligonucleotide"
agtagtaattgatggagaa

SEQ ID NO: 1725 - DNA, 19 bp, Artificial Sequence
  source: /note="Description of Artificial Sequence: Synthetic oligonucleotide"
tagtaattgatggagaaac

SEQ ID NO: 1726 - DNA, 19 bp, Artificial Sequence
  source: /note="Description of Artificial Sequence: Synthetic oligonucleotide"
gtctcttggatattctcga

SEQ ID NO: 1727 - DNA, 19 bp, Artificial Sequence
  source: /note="Description of Artificial Sequence: Synthetic oligonucleotide"
gggctttctttgtgtattt

SEQ ID NO: 1728 - DNA, 19 bp, Artificial Sequence
  source: /note="Description of Artificial Sequence: Synthetic oligonucleotide"
gtgtatttgccataaataa

SEQ ID NO: 1729 - DNA, 19 bp, Artificial Sequence
  source: /note="Description of Artificial Sequence: Synthetic oligonucleotide"
ccataaataatactaaatc

SEQ ID NO: 1730 - DNA, 19 bp, Artificial Sequence
  source: /note="Description of Artificial Sequence: Synthetic oligonucleotide"
tactaaatcatttgaagat

SEQ ID NO: 1731 - DNA, 19 bp, Artificial Sequence
  source: /note="Description of Artificial Sequence: Synthetic oligonucleotide"
ctaaatcatttgaagatat

SEQ ID NO: 1732 - DNA, 19 bp, Artificial Sequence
  source: /note="Description of Artificial Sequence: Synthetic oligonucleotide"
gaagatattcaccattata

SEQ ID NO: 1733 - DNA, 19 bp, Artificial Sequence
  source: /note="Description of Artificial Sequence: Synthetic oligonucleotide"
agatattcaccattataga

SEQ ID NO: 1734 - DNA, 19 bp, Artificial Sequence
  source: /note="Description of Artificial Sequence: Synthetic oligonucleotide"
atattcaccattatagaga

SEQ ID NO: 1735 - DNA, 19 bp, Artificial Sequence
  source: /note="Description of Artificial Sequence: Synthetic oligonucleotide"
tattcaccattatagagaa

SEQ ID NO: 1736 - DNA, 19 bp, Artificial Sequence
  source: /note="Description of Artificial Sequence: Synthetic oligonucleotide"
cattatagagaacaaatta

SEQ ID NO: 1737 - DNA, 19 bp, Artificial Sequence
  source: /note="Description of Artificial Sequence: Synthetic oligonucleotide"
ttatagagaacaaattaaa

SEQ ID NO: 1738 - DNA, 19 bp, Artificial Sequence
  source: /note="Description of Artificial Sequence: Synthetic oligonucleotide"
gagttaaggactctgaaga

SEQ ID NO: 1739 - DNA, 19 bp, Artificial Sequence
  source: /note="Description of Artificial Sequence: Synthetic oligonucleotide"
ctatggtcctagtaggaaa

SEQ ID NO: 1740 - DNA, 19 bp, Artificial Sequence
  source: /note="Description of Artificial Sequence: Synthetic oligonucleotide"
tggtcctagtaggaaataa

SEQ ID NO: 1741 - DNA, 19 bp, Artificial Sequence
  source: /note="Description of Artificial Sequence: Synthetic oligonucleotide"
ggtcctagtaggaaataaa

SEQ ID NO: 1742 - DNA, 19 bp, Artificial Sequence
  source: /note="Description of Artificial Sequence: Synthetic oligonucleotide"
gtaggaaataaatgtgatt

SEQ ID NO: 1743 - DNA, 19 bp, Artificial Sequence
  source: /note="Description of Artificial Sequence: Synthetic oligonucleotide"
atgtgatttgccttctaga

SEQ ID NO: 1744 - DNA, 19 bp, Artificial Sequence
  source: /note="Description of Artificial Sequence: Synthetic oligonucleotide"
ccttctagaacagtagaca

SEQ ID NO: 1745 - DNA, 19 bp, Artificial Sequence
  source: /note="Description of Artificial Sequence: Synthetic oligonucleotide"
aggctcaggacttagcaag

SEQ ID NO: 1746 - DNA, 19 bp, Artificial Sequence
  source: /note="Description of Artificial Sequence: Synthetic oligonucleotide"
ggacttagcaagaagttat

SEQ ID NO: 1747 - DNA, 19 bp, Artificial Sequence
  source: /note="Description of Artificial Sequence: Synthetic oligonucleotide"
agcaagaagttatggaatt

SEQ ID NO: 1748 - DNA, 19 bp, Artificial Sequence
  source: /note="Description of Artificial Sequence: Synthetic oligonucleotide"
ttatggaattccttttatt

SEQ ID NO: 1749 - DNA, 19 bp, Artificial Sequence
  source: /note="Description of Artificial Sequence: Synthetic oligonucleotide"
ggaattccttttattgaaa

SEQ ID NO: 1750 - DNA, 19 bp, Artificial Sequence
  source: /note="Description of Artificial Sequence: Synthetic oligonucleotide"
ccttttattgaaacatcag

SEQ ID NO: 1751 - DNA, 19 bp, Artificial Sequence
  source: /note="Description of Artificial Sequence: Synthetic oligonucleotide"
cctgatgaatgtaaagtta

SEQ ID NO: 1752 - DNA, 19 bp, Artificial Sequence
  source: /note="Description of Artificial Sequence: Synthetic oligonucleotide"
ggagaatttaataaagata

SEQ ID NO: 1753 - DNA, 19 bp, Artificial Sequence
  source: /note="Description of Artificial Sequence: Synthetic oligonucleotide"
gaatagtcataactagatt

SEQ ID NO: 1754 - DNA, 19 bp, Artificial Sequence
  source: /note="Description of Artificial Sequence: Synthetic oligonucleotide"
agctccaactaccacaagt

SEQ ID NO: 1755 - DNA, 19 bp, Artificial Sequence
  source: /note="Description of Artificial Sequence: Synthetic oligonucleotide"
atcgtcaaggcactcttgc

SEQ ID NO: 1756 - DNA, 19 bp, Artificial Sequence
  source: /note="Description of Artificial Sequence: Synthetic oligonucleotide"
tatcgtcaaggcactcttg

SEQ ID NO: 1757 - DNA, 19 bp, Artificial Sequence
  source: /note="Description of Artificial Sequence: Synthetic oligonucleotide"
attagctgtatcgtcaagg

SEQ ID NO: 1758 - DNA, 19 bp, Artificial Sequence
  source: /note="Description of Artificial Sequence: Synthetic oligonucleotide"
aatgattctgaattagctg

SEQ ID NO: 1759 - DNA, 19 bp, Artificial Sequence
  source: /note="Description of Artificial Sequence: Synthetic oligonucleotide"
tattgttggatcatattcg

SEQ ID NO: 1760 - DNA, 19 bp, Artificial Sequence
  source: /note="Description of Artificial Sequence: Synthetic oligonucleotide"
tcaattactacttgcttcc

SEQ ID NO: 1761 - DNA, 19 bp, Artificial Sequence
  source: /note="Description of Artificial Sequence: Synthetic oligonucleotide"
atcaattactacttgcttc

SEQ ID NO: 1762 - DNA, 19 bp, Artificial Sequence
  source: /note="Description of Artificial Sequence: Synthetic oligonucleotide"
ttctccatcaattactact

SEQ ID NO: 1763 - DNA, 19 bp, Artificial Sequence
  source: /note="Description of Artificial Sequence: Synthetic oligonucleotide"
gtttctccatcaattacta

SEQ ID NO: 1764 - DNA, 19 bp, Artificial Sequence
  source: /note="Description of Artificial Sequence: Synthetic oligonucleotide"
tcgagaatatccaagagac

SEQ ID NO: 1765 - DNA, 19 bp, Artificial Sequence
  source: /note="Description of Artificial Sequence: Synthetic oligonucleotide"
aaatacacaaagaaagccc

SEQ ID NO: 1766 - DNA, 19 bp, Artificial Sequence
  source: /note="Description of Artificial Sequence: Synthetic oligonucleotide"
ttatttatggcaaatacac

SEQ ID NO: 1767 - DNA, 19 bp, Artificial Sequence
  source: /note="Description of Artificial Sequence: Synthetic oligonucleotide"
gatttagtattatttatgg

SEQ ID NO: 1768 - DNA, 19 bp, Artificial Sequence
  source: /note="Description of Artificial Sequence: Synthetic oligonucleotide"
atcttcaaatgatttagta

SEQ ID NO: 1769 - DNA, 19 bp, Artificial Sequence
  source: /note="Description of Artificial Sequence: Synthetic oligonucleotide"
atatcttcaaatgatttag

SEQ ID NO: 1770 - DNA, 19 bp, Artificial Sequence
  source: /note="Description of Artificial Sequence: Synthetic oligonucleotide"
tataatggtgaatatcttc

SEQ ID NO: 1771 - DNA, 19 bp, Artificial Sequence
  source: /note="Description of Artificial Sequence: Synthetic oligonucleotide"
tctataatggtgaatatct

SEQ ID NO: 1772 - DNA, 19 bp, Artificial Sequence
  source: /note="Description of Artificial Sequence: Synthetic oligonucleotide"
tctctataatggtgaatat

SEQ ID NO: 1773 - DNA, 19 bp, Artificial Sequence
  source: /note="Description of Artificial Sequence: Synthetic oligonucleotide"
ttctctataatggtgaata

SEQ ID NO: 1774 - DNA, 19 bp, Artificial Sequence
  source: /note="Description of Artificial Sequence: Synthetic oligonucleotide"
taatttgttctctataatg

SEQ ID NO: 1775 - DNA, 19 bp, Artificial Sequence
  source: /note="Description of Artificial Sequence: Synthetic oligonucleotide"
tttaatttgttctctataa

SEQ ID NO: 1776 - DNA, 19 bp, Artificial Sequence
  source: /note="Description of Artificial Sequence: Synthetic oligonucleotide"
tcttcagagtccttaactc

SEQ ID NO: 1777 - DNA, 19 bp, Artificial Sequence
  source: /note="Description of Artificial Sequence: Synthetic oligonucleotide"
tttcctactaggaccatag

SEQ ID NO: 1778 - DNA, 19 bp, Artificial Sequence
  source: /note="Description of Artificial Sequence: Synthetic oligonucleotide"
ttatttcctactaggacca

SEQ ID NO: 1779 - DNA, 19 bp, Artificial Sequence
  source: /note="Description of Artificial Sequence: Synthetic oligonucleotide"
tttatttcctactaggacc

SEQ ID NO: 1780 - DNA, 19 bp, Artificial Sequence
  source: /note="Description of Artificial Sequence: Synthetic oligonucleotide"
aatcacatttatttcctac

SEQ ID NO: 1781 - DNA, 19 bp, Artificial Sequence
  source: /note="Description of Artificial Sequence: Synthetic oligonucleotide"
tctagaaggcaaatcacat

SEQ ID NO: 1782 - DNA, 19 bp, Artificial Sequence
  source: /note="Description of Artificial Sequence: Synthetic oligonucleotide"
tgtctactgttctagaagg

SEQ ID NO: 1783 - DNA, 19 bp, Artificial Sequence
  source: /note="Description of Artificial Sequence: Synthetic oligonucleotide"
cttgctaagtcctgagcct

SEQ ID NO: 1784 - DNA, 19 bp, Artificial Sequence
  source: /note="Description of Artificial Sequence: Synthetic oligonucleotide"
ataacttcttgctaagtcc

SEQ ID NO: 1785 - DNA, 19 bp, Artificial Sequence
  source: /note="Description of Artificial Sequence: Synthetic oligonucleotide"
aattccataacttcttgct

SEQ ID NO: 1786 - DNA, 19 bp, Artificial Sequence
  source: /note="Description of Artificial Sequence: Synthetic oligonucleotide"
aataaaaggaattccataa

SEQ ID NO: 1787 - DNA, 19 bp, Artificial Sequence
  source: /note="Description of Artificial Sequence: Synthetic oligonucleotide"
tttcaataaaaggaattcc

SEQ ID NO: 1788 - DNA, 19 bp, Artificial Sequence
  source: /note="Description of Artificial Sequence: Synthetic oligonucleotide"
ctgatgtttcaataaaagg

SEQ ID NO: 1789 - DNA, 19 bp, Artificial Sequence
  source: /note="Description of Artificial Sequence: Synthetic oligonucleotide"
taactttacattcatcagg

SEQ ID NO: 1790 - DNA, 19 bp, Artificial Sequence
  source: /note="Description of Artificial Sequence: Synthetic oligonucleotide"
tatctttattaaattctcc

SEQ ID NO: 1791 - DNA, 19 bp, Artificial Sequence
  source: /note="Description of Artificial Sequence: Synthetic oligonucleotide"
aatctagttatgactattc

SEQ ID NO: 1792 - DNA, 21 bp, Artificial Sequence
  source: /note="Description of Artificial Sequence: Synthetic oligonucleotide"
acttgtggtagttggagcttt

SEQ ID NO: 1793 - DNA, 21 bp, Artificial Sequence
  source: /note="Description of Artificial Sequence: Synthetic oligonucleotide"
gcaagagtgccttgacgattt

SEQ ID NO: 1794 - DNA, 21 bp, Artificial Sequence
  source: /note="Description of Artificial Sequence: Synthetic oligonucleotide"
caagagtgccttgacgatatt

SEQ ID NO: 1795 - DNA, 21 bp, Artificial Sequence
  source: /note="Description of Artificial Sequence: Synthetic oligonucleotide"
ccttgacgatacagctaattt

SEQ ID NO: 1796 - DNA, 21 bp, Artificial Sequence
  source: /note="Description of Artificial Sequence: Synthetic oligonucleotide"
cagctaattcagaatcatttt

SEQ ID NO: 1797 - DNA, 21 bp, Artificial Sequence
  source: /note="Description of Artificial Sequence: Synthetic oligonucleotide"
cgaatatgatccaacaatatt

SEQ ID NO: 1798 - DNA, 21 bp, Artificial Sequence
  source: /note="Description of Artificial Sequence: Synthetic oligonucleotide"
  source: /note="Description of Combined DNA/RNA Molecule: Synthetic oligonucleotide"
ggaagcaagtagtaattgauu

SEQ ID NO: 1799 - DNA, 21 bp, Artificial Sequence
  source: /note="Description of Artificial Sequence: Synthetic oligonucleotide"
  source: /note="Description of Combined DNA/RNA Molecule: Synthetic oligonucleotide"
gaagcaagtagtaattgatuu

SEQ ID NO: 1800 - DNA, 21 bp, Artificial Sequence
  source: /note="Description of Artificial Sequence: Synthetic oligonucleotide"
agtagtaattgatggagaatt

SEQ ID NO: 1801 - DNA, 21 bp, Artificial Sequence
  source: /note="Description of Artificial Sequence: Synthetic oligonucleotide"
tagtaattgatggagaaactt

SEQ ID NO: 1802 - DNA, 21 bp, Artificial Sequence
  source: /note="Description of Artificial Sequence: Synthetic oligonucleotide"
gtctcttggatattctcgatt

SEQ ID NO: 1803 - DNA, 21 bp, Artificial Sequence
  source: /note="Description of Artificial Sequence: Synthetic oligonucleotide"
gggctttctttgtgtattttt

SEQ ID NO: 1804 - DNA, 21 bp, Artificial Sequence
  source: /note="Description of Artificial Sequence: Synthetic oligonucleotide"
gtgtatttgccataaataatt

SEQ ID NO: 1805 - DNA, 21 bp, Artificial Sequence
  source: /note="Description of Artificial Sequence: Synthetic oligonucleotide"
ccataaataatactaaatctt

SEQ ID NO: 1806 - DNA, 21 bp, Artificial Sequence
  source: /note="Description of Artificial Sequence: Synthetic oligonucleotide"
tactaaatcatttgaagattt

SEQ ID NO: 1807 - DNA, 21 bp, Artificial Sequence
  source: /note="Description of Artificial Sequence: Synthetic oligonucleotide"
  source: /note="Description of Combined DNA/RNA Molecule: Synthetic oligonucleotide"
ctaaatcatttgaagatatuu

SEQ ID NO: 1808 - DNA, 21 bp, Artificial Sequence
  source: /note="Description of Artificial Sequence: Synthetic oligonucleotide"
gaagatattcaccattatatt

SEQ ID NO: 1809 - DNA, 21 bp, Artificial Sequence
  source: /note="Description of Artificial Sequence: Synthetic oligonucleotide"
agatattcaccattatagatt

SEQ ID NO: 1810 - DNA, 21 bp, Artificial Sequence
  source: /note="Description of Artificial Sequence: Synthetic oligonucleotide"
atattcaccattatagagatt

SEQ ID NO: 1811 - DNA, 21 bp, Artificial Sequence
  source: /note="Description of Artificial Sequence: Synthetic oligonucleotide"
tattcaccattatagagaatt

SEQ ID NO: 1812 - DNA, 21 bp, Artificial Sequence
  source: /note="Description of Artificial Sequence: Synthetic oligonucleotide"
cattatagagaacaaattatt

SEQ ID NO: 1813 - DNA, 21 bp, Artificial Sequence
  source: /note="Description of Artificial Sequence: Synthetic oligonucleotide"
ttatagagaacaaattaaatt

SEQ ID NO: 1814 - DNA, 21 bp, Artificial Sequence
  source: /note="Description of Artificial Sequence: Synthetic oligonucleotide"
gagttaaggactctgaagatt

SEQ ID NO: 1815 - DNA, 21 bp, Artificial Sequence
  source: /note="Description of Artificial Sequence: Synthetic oligonucleotide"
  source: /note="Description of Combined DNA/RNA Molecule: Synthetic oligonucleotide"
ctatggtcctagtaggaaauu

SEQ ID NO: 1816 - DNA, 21 bp, Artificial Sequence
  source: /note="Description of Artificial Sequence: Synthetic oligonucleotide"
  source: /note="Description of Combined DNA/RNA Molecule: Synthetic oligonucleotide"
tggtcctagtaggaaataauu

SEQ ID NO: 1817 - DNA, 21 bp, Artificial Sequence
  source: /note="Description of Artificial Sequence: Synthetic oligonucleotide"
ggtcctagtaggaaataaatt

SEQ ID NO: 1818 - DNA, 21 bp, Artificial Sequence
  source: /note="Description of Artificial Sequence: Synthetic oligonucleotide"
gtaggaaataaatgtgatttt

SEQ ID NO: 1819 - DNA, 21 bp, Artificial Sequence
  source: /note="Description of Artificial Sequence: Synthetic oligonucleotide"
atgtgatttgccttctagatt

SEQ ID NO: 1820 - DNA, 21 bp, Artificial Sequence
  source: /note="Description of Artificial Sequence: Synthetic oligonucleotide"
ccttctagaacagtagacatt

SEQ ID NO: 1821 - DNA, 21 bp, Artificial Sequence
  source: /note="Description of Artificial Sequence: Synthetic oligonucleotide"
aggctcaggacttagcaagtt

SEQ ID NO: 1822 - DNA, 21 bp, Artificial Sequence
  source: /note="Description of Artificial Sequence: Synthetic oligonucleotide"
ggacttagcaagaagttattt

SEQ ID NO: 1823 - DNA, 21 bp, Artificial Sequence
  source: /note="Description of Artificial Sequence: Synthetic oligonucleotide"
agcaagaagttatggaatttt

SEQ ID NO: 1824 - DNA, 21 bp, Artificial Sequence
  source: /note="Description of Artificial Sequence: Synthetic oligonucleotide"
ttatggaattccttttatttt

SEQ ID NO: 1825 - DNA, 21 bp, Artificial Sequence
  source: /note="Description of Artificial Sequence: Synthetic oligonucleotide"
ggaattccttttattgaaatt

SEQ ID NO: 1826 - DNA, 21 bp, Artificial Sequence
  source: /note="Description of Artificial Sequence: Synthetic oligonucleotide"
ccttttattgaaacatcagtt

SEQ ID NO: 1827 - DNA, 21 bp, Artificial Sequence
  source: /note="Description of Artificial Sequence: Synthetic oligonucleotide"
  source: /note="Description of Combined DNA/RNA Molecule: Synthetic oligonucleotide"
cctgatgaatgtaaagttauu

SEQ ID NO: 1828 - DNA, 21 bp, Artificial Sequence
  source: /note="Description of Artificial Sequence: Synthetic oligonucleotide"
  source: /note="Description of Combined DNA/RNA Molecule: Synthetic oligonucleotide"
ggagaatttaataaagatauu

SEQ ID NO: 1829 - DNA, 21 bp, Artificial Sequence
  source: /note="Description of Artificial Sequence: Synthetic oligonucleotide"
  source: /note="Description of Combined DNA/RNA Molecule: Synthetic oligonucleotide"
gaatagtcataactagattuu

SEQ ID NO: 1830 - DNA, 21 bp, Artificial Sequence
  source: /note="Description of Artificial Sequence: Synthetic oligonucleotide"
agctccaactaccacaagttt

SEQ ID NO: 1831 - DNA, 21 bp, Artificial Sequence
  source: /note="Description of Artificial Sequence: Synthetic oligonucleotide"
atcgtcaaggcactcttgctt

SEQ ID NO: 1832 - DNA, 21 bp, Artificial Sequence
  source: /note="Description of Artificial Sequence: Synthetic oligonucleotide"
tatcgtcaaggcactcttgtt

SEQ ID NO: 1833 - DNA, 21 bp, Artificial Sequence
  source: /note="Description of Artificial Sequence: Synthetic oligonucleotide"
attagctgtatcgtcaaggtt

SEQ ID NO: 1834 - DNA, 21 bp, Artificial Sequence
  source: /note="Description of Artificial Sequence: Synthetic oligonucleotide"
aatgattctgaattagctgtt

SEQ ID NO: 1835 - DNA, 21 bp, Artificial Sequence
  source: /note="Description of Artificial Sequence: Synthetic oligonucleotide"
tattgttggatcatattcgtt

SEQ ID NO: 1836 - DNA, 21 bp, Artificial Sequence
  source: /note="Description of Artificial Sequence: Synthetic oligonucleotide"
  source: /note="Description of Combined DNA/RNA Molecule: Synthetic oligonucleotide"
tcaattactacttgcttccuu

SEQ ID NO: 1837 - DNA, 21 bp, Artificial Sequence
  source: /note="Description of Artificial Sequence: Synthetic oligonucleotide"
  source: /note="Description of Combined DNA/RNA Molecule: Synthetic oligonucleotide"
atcaattactacttgcttcuu

SEQ ID NO: 1838 - DNA, 21 bp, Artificial Sequence
  source: /note="Description of Artificial Sequence: Synthetic oligonucleotide"
ttctccatcaattactacttt

SEQ ID NO: 1839 - DNA, 21 bp, Artificial Sequence
  source: /note="Description of Artificial Sequence: Synthetic oligonucleotide"
gtttctccatcaattactatt

SEQ ID NO: 1840 - DNA, 21 bp, Artificial Sequence
  source: /note="Description of Artificial Sequence: Synthetic oligonucleotide"
tcgagaatatccaagagactt

SEQ ID NO: 1841 - DNA, 21 bp, Artificial Sequence
  source: /note="Description of Artificial Sequence: Synthetic oligonucleotide"
aaatacacaaagaaagccctt

SEQ ID NO: 1842 - DNA, 21 bp, Artificial Sequence
  source: /note="Description of Artificial Sequence: Synthetic oligonucleotide"
ttatttatggcaaatacactt

SEQ ID NO: 1843 - DNA, 21 bp, Artificial Sequence
  source: /note="Description of Artificial Sequence: Synthetic oligonucleotide"
gatttagtattatttatggtt

SEQ ID NO: 1844 - DNA, 21 bp, Artificial Sequence
  source: /note="Description of Artificial Sequence: Synthetic oligonucleotide"
atcttcaaatgatttagtatt

SEQ ID NO: 1845 - DNA, 21 bp, Artificial Sequence
  source: /note="Description of Artificial Sequence: Synthetic oligonucleotide"
  source: /note="Description of Combined DNA/RNA Molecule: Synthetic oligonucleotide"
atatcttcaaatgatttaguu

SEQ ID NO: 1846 - DNA, 21 bp, Artificial Sequence
  source: /note="Description of Artificial Sequence: Synthetic oligonucleotide"
tataatggtgaatatcttctt

SEQ ID NO: 1847 - DNA, 21 bp, Artificial Sequence
  source: /note="Description of Artificial Sequence: Synthetic oligonucleotide"
tctataatggtgaatatcttt

SEQ ID NO: 1848 - DNA, 21 bp, Artificial Sequence
  source: /note="Description of Artificial Sequence: Synthetic oligonucleotide"
tctctataatggtgaatattt

SEQ ID NO: 1849 - DNA, 21 bp, Artificial Sequence
  source: /note="Description of Artificial Sequence: Synthetic oligonucleotide"
ttctctataatggtgaatatt

SEQ ID NO: 1850 - DNA, 21 bp, Artificial Sequence
  source: /note="Description of Artificial Sequence: Synthetic oligonucleotide"
taatttgttctctataatgtt

SEQ ID NO: 1851 - DNA, 21 bp, Artificial Sequence
  source: /note="Description of Artificial Sequence: Synthetic oligonucleotide"
tttaatttgttctctataatt

SEQ ID NO: 1852 - DNA, 21 bp, Artificial Sequence
  source: /note="Description of Artificial Sequence: Synthetic oligonucleotide"
tcttcagagtccttaactctt

SEQ ID NO: 1853 - DNA, 21 bp, Artificial Sequence
  source: /note="Description of Artificial Sequence: Synthetic oligonucleotide"
  source: /note="Description of Combined DNA/RNA Molecule: Synthetic oligonucleotide"
tttcctactaggaccataguu

SEQ ID NO: 1854 - DNA, 21 bp, Artificial Sequence
  source: /note="Description of Artificial Sequence: Synthetic oligonucleotide"
  source: /note="Description of Combined DNA/RNA Molecule: Synthetic oligonucleotide"
ttatttcctactaggaccauu

SEQ ID NO: 1855 - DNA, 21 bp, Artificial Sequence
  source: /note="Description of Artificial Sequence: Synthetic oligonucleotide"
tttatttcctactaggacctt

SEQ ID NO: 1856 - DNA, 21 bp, Artificial Sequence
  source: /note="Description of Artificial Sequence: Synthetic oligonucleotide"
aatcacatttatttcctactt

SEQ ID NO: 1857 - DNA, 21 bp, Artificial Sequence
  source: /note="Description of Artificial Sequence: Synthetic oligonucleotide"
tctagaaggcaaatcacattt

SEQ ID NO: 1858 - DNA, 21 bp, Artificial Sequence
  source: /note="Description of Artificial Sequence: Synthetic oligonucleotide"
tgtctactgttctagaaggtt

SEQ ID NO: 1859 - DNA, 21 bp, Artificial Sequence
  source: /note="Description of Artificial Sequence: Synthetic oligonucleotide"
cttgctaagtcctgagccttt

SEQ ID NO: 1860 - DNA, 21 bp, Artificial Sequence
  source: /note="Description of Artificial Sequence: Synthetic oligonucleotide"
ataacttcttgctaagtcctt

SEQ ID NO: 1861 - DNA, 21 bp, Artificial Sequence
  source: /note="Description of Artificial Sequence: Synthetic oligonucleotide"
aattccataacttcttgcttt

SEQ ID NO: 1862 - DNA, 21 bp, Artificial Sequence
  source: /note="Description of Artificial Sequence: Synthetic oligonucleotide"
aataaaaggaattccataatt

SEQ ID NO: 1863 - DNA, 21 bp, Artificial Sequence
  source: /note="Description of Artificial Sequence: Synthetic oligonucleotide"
tttcaataaaaggaattcctt

SEQ ID NO: 1864 - DNA, 21 bp, Artificial Sequence
  source: /note="Description of Artificial Sequence: Synthetic oligonucleotide"
ctgatgtttcaataaaaggtt

SEQ ID NO: 1865 - DNA, 21 bp, Artificial Sequence
  source: /note="Description of Artificial Sequence: Synthetic oligonucleotide"
  source: /note="Description of Combined DNA/RNA Molecule: Synthetic oligonucleotide"
taactttacattcatcagguu

SEQ ID NO: 1866 - DNA, 21 bp, Artificial Sequence
  source: /note="Description of Artificial Sequence: Synthetic oligonucleotide"
  source: /note="Description of Combined DNA/RNA Molecule: Synthetic oligonucleotide"
tatctttattaaattctccuu

SEQ ID NO: 1867 - DNA, 21 bp, Artificial Sequence
  source: /note="Description of Artificial Sequence: Synthetic oligonucleotide"
  source: /note="Description of Combined DNA/RNA Molecule: Synthetic oligonucleotide"
aatctagttatgactattcuu

SEQ ID NO: 1868 - RNA, 12 nt, Artificial Sequence
  source: /note="Description of Artificial Sequence: Synthetic oligonucleotide"
ugacugaauaua

SEQ ID NO: 1869 - RNA, 12 nt, Artificial Sequence
  source: /note="Description of Artificial Sequence: Synthetic oligonucleotide"
uauauucaguca

SEQ ID NO: 1870 - RNA, 12 nt, Artificial Sequence
  source: /note="Description of Artificial Sequence: Synthetic oligonucleotide"
gacugaauauaa

SEQ ID NO: 1871 - RNA, 12 nt, Artificial Sequence
  source: /note="Description of Artificial Sequence: Synthetic oligonucleotide"
uuauauucaguc

SEQ ID NO: 1872 - RNA, 12 nt, Artificial Sequence
  source: /note="Description of Artificial Sequence: Synthetic oligonucleotide"
acugaauauaaa

SEQ ID NO: 1873 - RNA, 12 nt, Artificial Sequence
  source: /note="Description of Artificial Sequence: Synthetic oligonucleotide"
uuuauauucagu

SEQ ID NO: 1874 - RNA, 12 nt, Artificial Sequence
  source: /note="Description of Artificial Sequence: Synthetic oligonucleotide"
cugaauauaaac

SEQ ID NO: 1875 - RNA, 12 nt, Artificial Sequence
  source: /note="Description of Artificial Sequence: Synthetic oligonucleotide"
guuuauauucag

SEQ ID NO: 1876 - RNA, 12 nt, Artificial Sequence
  source: /note="Description of Artificial Sequence: Synthetic oligonucleotide"
ugaauauaaacu

SEQ ID NO: 1877 - RNA, 12 nt, Artificial Sequence
  source: /note="Description of Artificial Sequence: Synthetic oligonucleotide"
aguuuauauuca

SEQ ID NO: 1878 - RNA, 12 nt, Artificial Sequence
  source: /note="Description of Artificial Sequence: Synthetic oligonucleotide"
gaauauaaacuu

SEQ ID NO: 1879 - RNA, 12 nt, Artificial Sequence
  source: /note="Description of Artificial Sequence: Synthetic oligonucleotide"
aaguuuauauuc

SEQ ID NO: 1880 - RNA, 12 nt, Artificial Sequence
  source: /note="Description of Artificial Sequence: Synthetic oligonucleotide"
aauauaaacuug

SEQ ID NO: 1881 - RNA, 12 nt, Artificial Sequence
  source: /note="Description of Artificial Sequence: Synthetic oligonucleotide"
caaguuuauauu

SEQ ID NO: 1882 - RNA, 12 nt, Artificial Sequence
  source: /note="Description of Artificial Sequence: Synthetic oligonucleotide"
auauaaacuugu

SEQ ID NO: 1883 - RNA, 12 nt, Artificial Sequence
  source: /note="Description of Artificial Sequence: Synthetic oligonucleotide"
acaaguuuauau

SEQ ID NO: 1884 - RNA, 12 nt, Artificial Sequence
  source: /note="Description of Artificial Sequence: Synthetic oligonucleotide"
uauaaacuugug

SEQ ID NO: 1885 - RNA, 12 nt, Artificial Sequence
  source: /note="Description of Artificial Sequence: Synthetic oligonucleotide"
cacaaguuuaua

SEQ ID NO: 1886 - RNA, 12 nt, Artificial Sequence
  source: /note="Description of Artificial Sequence: Synthetic oligonucleotide"
auaaacuugugg

SEQ ID NO: 1887 - RNA, 12 nt, Artificial Sequence
  source: /note="Description of Artificial Sequence: Synthetic oligonucleotide"
ccacaaguuuau

SEQ ID NO: 1888 - RNA, 12 nt, Artificial Sequence
  source: /note="Description of Artificial Sequence: Synthetic oligonucleotide"
uaaacuuguggu

SEQ ID NO: 1889 - RNA, 12 nt, Artificial Sequence
  source: /note="Description of Artificial Sequence: Synthetic oligonucleotide"
accacaaguuua

SEQ ID NO: 1890 - RNA, 12 nt, Artificial Sequence
  source: /note="Description of Artificial Sequence: Synthetic oligonucleotide"
aaacuuguggua

SEQ ID NO: 1891 - RNA, 12 nt, Artificial Sequence
  source: /note="Description of Artificial Sequence: Synthetic oligonucleotide"
uaccacaaguuu

SEQ ID NO: 1892 - RNA, 12 nt, Artificial Sequence
  source: /note="Description of Artificial Sequence: Synthetic oligonucleotide"
aacuugugguag

SEQ ID NO: 1893 - RNA, 12 nt, Artificial Sequence
  source: /note="Description of Artificial Sequence: Synthetic oligonucleotide"
cuaccacaaguu

SEQ ID NO: 1894 - RNA, 12 nt, Artificial Sequence
  source: /note="Description of Artificial Sequence: Synthetic oligonucleotide"
acuugugguagu

SEQ ID NO: 1895 - RNA, 12 nt, Artificial Sequence
  source: /note="Description of Artificial Sequence: Synthetic oligonucleotide"
acuaccacaagu

SEQ ID NO: 1896 - RNA, 12 nt, Artificial Sequence
  source: /note="Description of Artificial Sequence: Synthetic oligonucleotide"
cuugugguaguu

SEQ ID NO: 1897 - RNA, 12 nt, Artificial Sequence
  source: /note="Description of Artificial Sequence: Synthetic oligonucleotide"
aacuaccacaag

SEQ ID NO: 1898 - RNA, 12 nt, Artificial Sequence
  source: /note="Description of Artificial Sequence: Synthetic oligonucleotide"
uugugguaguug

SEQ ID NO: 1899 - RNA, 12 nt, Artificial Sequence
  source: /note="Description of Artificial Sequence: Synthetic oligonucleotide"
caacuaccacaa

SEQ ID NO: 1900 - RNA, 12 nt, Artificial Sequence
  source: /note="Description of Artificial Sequence: Synthetic oligonucleotide"
ugugguaguugg

SEQ ID NO: 1901 - RNA, 12 nt, Artificial Sequence
  source: /note="Description of Artificial Sequence: Synthetic oligonucleotide"
ccaacuaccaca

SEQ ID NO: 1902 - RNA, 12 nt, Artificial Sequence
  source: /note="Description of Artificial Sequence: Synthetic oligonucleotide"
gugguaguugga

SEQ ID NO: 1903 - RNA, 12 nt, Artificial Sequence
  source: /note="Description of Artificial Sequence: Synthetic oligonucleotide"
uccaacuaccac

SEQ ID NO: 1904 - RNA, 12 nt, Artificial Sequence
  source: /note="Description of Artificial Sequence: Synthetic oligonucleotide"
ugguaguuggag

SEQ ID NO: 1905 - RNA, 12 nt, Artificial Sequence
  source: /note="Description of Artificial Sequence: Synthetic oligonucleotide"
cuccaacuacca

SEQ ID NO: 1906 - RNA, 12 nt, Artificial Sequence
  source: /note="Description of Artificial Sequence: Synthetic oligonucleotide"
gguaguuggagc

SEQ ID NO: 1907 - RNA, 12 nt, Artificial Sequence
  source: /note="Description of Artificial Sequence: Synthetic oligonucleotide"
gcuccaacuacc

SEQ ID NO: 1908 - RNA, 12 nt, Artificial Sequence
  source: /note="Description of Artificial Sequence: Synthetic oligonucleotide"
guaguuggagcu

SEQ ID NO: 1909 - RNA, 12 nt, Artificial Sequence
  source: /note="Description of Artificial Sequence: Synthetic oligonucleotide"
agcuccaacuac

SEQ ID NO: 1910 - RNA, 12 nt, Artificial Sequence
  source: /note="Description of Artificial Sequence: Synthetic oligonucleotide"
uaguuggagcug

SEQ ID NO: 1911 - RNA, 12 nt, Artificial Sequence
  source: /note="Description of Artificial Sequence: Synthetic oligonucleotide"
cagcuccaacua

SEQ ID NO: 1912 - RNA, 12 nt, Artificial Sequence
  source: /note="Description of Artificial Sequence: Synthetic oligonucleotide"
aguuggagcugg

SEQ ID NO: 1913 - RNA, 12 nt, Artificial Sequence
  source: /note="Description of Artificial Sequence: Synthetic oligonucleotide"
ccagcuccaacu

SEQ ID NO: 1914 - RNA, 12 nt, Artificial Sequence
  source: /note="Description of Artificial Sequence: Synthetic oligonucleotide"
guuggagcuggu

SEQ ID NO: 1915 - RNA, 12 nt, Artificial Sequence
  source: /note="Description of Artificial Sequence: Synthetic oligonucleotide"
accagcuccaac

SEQ ID NO: 1916 - RNA, 12 nt, Artificial Sequence
  source: /note="Description of Artificial Sequence: Synthetic oligonucleotide"
uuggagcuggug

SEQ ID NO: 1917 - RNA, 12 nt, Artificial Sequence
  source: /note="Description of Artificial Sequence: Synthetic oligonucleotide"
caccagcuccaa

SEQ ID NO: 1918 - RNA, 12 nt, Artificial Sequence
  source: /note="Description of Artificial Sequence: Synthetic oligonucleotide"
uggagcuggugg

SEQ ID NO: 1919 - RNA, 12 nt, Artificial Sequence
  source: /note="Description of Artificial Sequence: Synthetic oligonucleotide"
ccaccagcucca

SEQ ID NO: 1920 - RNA, 12 nt, Artificial Sequence
  source: /note="Description of Artificial Sequence: Synthetic oligonucleotide"
ggagcugguggc

SEQ ID NO: 1921 - RNA, 12 nt, Artificial Sequence
  source: /note="Description of Artificial Sequence: Synthetic oligonucleotide"
gccaccagcucc

SEQ ID NO: 1922 - RNA, 12 nt, Artificial Sequence
  source: /note="Description of Artificial Sequence: Synthetic oligonucleotide"
gagcugguggcg

SEQ ID NO: 1923 - RNA, 12 nt, Artificial Sequence
  source: /note="Description of Artificial Sequence: Synthetic oligonucleotide"
cgccaccagcuc

SEQ ID NO: 1924 - RNA, 12 nt, Artificial Sequence
  source: /note="Description of Artificial Sequence: Synthetic oligonucleotide"
agcugguggcgu

SEQ ID NO: 1925 - RNA, 12 nt, Artificial Sequence
  source: /note="Description of Artificial Sequence: Synthetic oligonucleotide"
acgccaccagcu

SEQ ID NO: 1926 - RNA, 12 nt, Artificial Sequence
  source: /note="Description of Artificial Sequence: Synthetic oligonucleotide"
gcugguggcgua

SEQ ID NO: 1927 - RNA, 12 nt, Artificial Sequence
  source: /note="Description of Artificial Sequence: Synthetic oligonucleotide"
uacgccaccagc

SEQ ID NO: 1928 - RNA, 12 nt, Artificial Sequence
  source: /note="Description of Artificial Sequence: Synthetic oligonucleotide"
cugguggcguag

SEQ ID NO: 1929 - RNA, 12 nt, Artificial Sequence
  source: /note="Description of Artificial Sequence: Synthetic oligonucleotide"
cuacgccaccag

SEQ ID NO: 1930 - RNA, 12 nt, Artificial Sequence
  source: /note="Description of Artificial Sequence: Synthetic oligonucleotide"
ugguggcguagg

SEQ ID NO: 1931 - RNA, 12 nt, Artificial Sequence
  source: /note="Description of Artificial Sequence: Synthetic oligonucleotide"
ccuacgccacca

SEQ ID NO: 1932 - RNA, 12 nt, Artificial Sequence
  source: /note="Description of Artificial Sequence: Synthetic oligonucleotide"
gguggcguaggc

SEQ ID NO: 1933 - RNA, 12 nt, Artificial Sequence
  source: /note="Description of Artificial Sequence: Synthetic oligonucleotide"
gccuacgccacc

SEQ ID NO: 1934 - RNA, 12 nt, Artificial Sequence
  source: /note="Description of Artificial Sequence: Synthetic oligonucleotide"
guggcguaggca

SEQ ID NO: 1935 - RNA, 12 nt, Artificial Sequence
  source: /note="Description of Artificial Sequence: Synthetic oligonucleotide"
ugccuacgccac

SEQ ID NO: 1936 - RNA, 12 nt, Artificial Sequence
  source: /note="Description of Artificial Sequence: Synthetic oligonucleotide"
uggcguaggcaa

SEQ ID NO: 1937 - RNA, 12 nt, Artificial Sequence
  source: /note="Description of Artificial Sequence: Synthetic oligonucleotide"
uugccuacgcca

SEQ ID NO: 1938 - RNA, 12 nt, Artificial Sequence
  source: /note="Description of Artificial Sequence: Synthetic oligonucleotide"
ggcguaggcaag

SEQ ID NO: 1939 - RNA, 12 nt, Artificial Sequence
  source: /note="Description of Artificial Sequence: Synthetic oligonucleotide"
cuugccuacgcc

SEQ ID NO: 1940 - RNA, 12 nt, Artificial Sequence
  source: /note="Description of Artificial Sequence: Synthetic oligonucleotide"
gcguaggcaaga

SEQ ID NO: 1941 - RNA, 12 nt, Artificial Sequence
  source: /note="Description of Artificial Sequence: Synthetic oligonucleotide"
ucuugccuacgc

SEQ ID NO: 1942 - RNA, 12 nt, Artificial Sequence
  source: /note="Description of Artificial Sequence: Synthetic oligonucleotide"
cguaggcaagag

SEQ ID NO: 1943 - RNA, 12 nt, Artificial Sequence
  source: /note="Description of Artificial Sequence: Synthetic oligonucleotide"
cucuugccuacg

SEQ ID NO: 1944 - RNA, 12 nt, Artificial Sequence
  source: /note="Description of Artificial Sequence: Synthetic oligonucleotide"
guaggcaagagu

SEQ ID NO: 1945 - RNA, 12 nt, Artificial Sequence
  source: /note="Description of Artificial Sequence: Synthetic oligonucleotide"
acucuugccuac

SEQ ID NO: 1946 - RNA, 12 nt, Artificial Sequence
  source: /note="Description of Artificial Sequence: Synthetic oligonucleotide"
uaggcaagagug

SEQ ID NO: 1947 - RNA, 12 nt, Artificial Sequence
  source: /note="Description of Artificial Sequence: Synthetic oligonucleotide"
cacucuugccua

SEQ ID NO: 1948 - RNA, 12 nt, Artificial Sequence
  source: /note="Description of Artificial Sequence: Synthetic oligonucleotide"
aggcaagagugc

SEQ ID NO: 1949 - RNA, 12 nt, Artificial Sequence
  source: /note="Description of Artificial Sequence: Synthetic oligonucleotide"
gcacucuugccu

SEQ ID NO: 1950 - RNA, 12 nt, Artificial Sequence
  source: /note="Description of Artificial Sequence: Synthetic oligonucleotide"
ggcaagagugcc

SEQ ID NO: 1951 - RNA, 12 nt, Artificial Sequence
  source: /note="Description of Artificial Sequence: Synthetic oligonucleotide"
ggcacucuugcc

SEQ ID NO: 1952 - RNA, 12 nt, Artificial Sequence
  source: /note="Description of Artificial Sequence: Synthetic oligonucleotide"
gcaagagugccu

SEQ ID NO: 1953 - RNA, 12 nt, Artificial Sequence
  source: /note="Description of Artificial Sequence: Synthetic oligonucleotide"
aggcacucuugc

SEQ ID NO: 1954 - RNA, 12 nt, Artificial Sequence
  source: /note="Description of Artificial Sequence: Synthetic oligonucleotide"
caagagugccuu

SEQ ID NO: 1955 - RNA, 12 nt, Artificial Sequence
  source: /note="Description of Artificial Sequence: Synthetic oligonucleotide"
aaggcacucuug

SEQ ID NO: 1956 - RNA, 12 nt, Artificial Sequence
  source: /note="Description of Artificial Sequence: Synthetic oligonucleotide"
aagagugccuug

SEQ ID NO: 1957 - RNA, 12 nt, Artificial Sequence
  source: /note="Description of Artificial Sequence: Synthetic oligonucleotide"
caaggcacucuu

SEQ ID NO: 1958 - RNA, 12 nt, Artificial Sequence
  source: /note="Description of Artificial Sequence: Synthetic oligonucleotide"
agagugccuuga

SEQ ID NO: 1959 - RNA, 12 nt, Artificial Sequence
  source: /note="Description of Artificial Sequence: Synthetic oligonucleotide"
ucaaggcacucu

SEQ ID NO: 1960 - RNA, 12 nt, Artificial Sequence
  source: /note="Description of Artificial Sequence: Synthetic oligonucleotide"
gagugccuugac

SEQ ID NO: 1961 - RNA, 12 nt, Artificial Sequence
  source: /note="Description of Artificial Sequence: Synthetic oligonucleotide"
gucaaggcacuc

SEQ ID NO: 1962 - RNA, 12 nt, Artificial Sequence
  source: /note="Description of Artificial Sequence: Synthetic oligonucleotide"
agugccuugacg

SEQ ID NO: 1963 - RNA, 12 nt, Artificial Sequence
  source: /note="Description of Artificial Sequence: Synthetic oligonucleotide"
cgucaaggcacu

SEQ ID NO: 1964 - RNA, 12 nt, Artificial Sequence
  source: /note="Description of Artificial Sequence: Synthetic oligonucleotide"
gugccuugacga

SEQ ID NO: 1965 - RNA, 12 nt, Artificial Sequence
  source: /note="Description of Artificial Sequence: Synthetic oligonucleotide"
ucgucaaggcac

SEQ ID NO: 1966 - RNA, 12 nt, Artificial Sequence
  source: /note="Description of Artificial Sequence: Synthetic oligonucleotide"
ugccuugacgau

SEQ ID NO: 1967 - RNA, 12 nt, Artificial Sequence
  source: /note="Description of Artificial Sequence: Synthetic oligonucleotide"
aucgucaaggca

SEQ ID NO: 1968 - RNA, 12 nt, Artificial Sequence
  source: /note="Description of Artificial Sequence: Synthetic oligonucleotide"
gccuugacgaua

SEQ ID NO: 1969 - RNA, 12 nt, Artificial Sequence
  source: /note="Description of Artificial Sequence: Synthetic oligonucleotide"
uaucgucaaggc

SEQ ID NO: 1970 - RNA, 12 nt, Artificial Sequence
  source: /note="Description of Artificial Sequence: Synthetic oligonucleotide"
ccuugacgauac

SEQ ID NO: 1971 - RNA, 12 nt, Artificial Sequence
  source: /note="Description of Artificial Sequence: Synthetic oligonucleotide"
guaucgucaagg

SEQ ID NO: 1972 - RNA, 12 nt, Artificial Sequence
  source: /note="Description of Artificial Sequence: Synthetic oligonucleotide"
cuugacgauaca

SEQ ID NO: 1973 - RNA, 12 nt, Artificial Sequence
  source: /note="Description of Artificial Sequence: Synthetic oligonucleotide"
uguaucgucaag

SEQ ID NO: 1974 - RNA, 12 nt, Artificial Sequence
  source: /note="Description of Artificial Sequence: Synthetic oligonucleotide"
uugacgauacag

SEQ ID NO: 1975 - RNA, 12 nt, Artificial Sequence
  source: /note="Description of Artificial Sequence: Synthetic oligonucleotide"
cuguaucgucaa

SEQ ID NO: 1976 - RNA, 12 nt, Artificial Sequence
  source: /note="Description of Artificial Sequence: Synthetic oligonucleotide"
ugacgauacagc

SEQ ID NO: 1977 - RNA, 12 nt, Artificial Sequence
  source: /note="Description of Artificial Sequence: Synthetic oligonucleotide"
gcuguaucguca

SEQ ID NO: 1978 - RNA, 12 nt, Artificial Sequence
  source: /note="Description of Artificial Sequence: Synthetic oligonucleotide"
gacgauacagcu

SEQ ID NO: 1979 - RNA, 12 nt, Artificial Sequence
  source: /note="Description of Artificial Sequence: Synthetic oligonucleotide"
agcuguaucguc

SEQ ID NO: 1980 - RNA, 12 nt, Artificial Sequence
  source: /note="Description of Artificial Sequence: Synthetic oligonucleotide"
acgauacagcua

SEQ ID NO: 1981 - RNA, 12 nt, Artificial Sequence
  source: /note="Description of Artificial Sequence: Synthetic oligonucleotide"
uagcuguaucgu

SEQ ID NO: 1982 - RNA, 12 nt, Artificial Sequence
  source: /note="Description of Artificial Sequence: Synthetic oligonucleotide"
cgauacagcuaa

SEQ ID NO: 1983 - RNA, 12 nt, Artificial Sequence
  source: /note="Description of Artificial Sequence: Synthetic oligonucleotide"
uuagcuguaucg

SEQ ID NO: 1984 - RNA, 12 nt, Artificial Sequence
  source: /note="Description of Artificial Sequence: Synthetic oligonucleotide"
gauacagcuaau

SEQ ID NO: 1985 - RNA, 12 nt, Artificial Sequence
  source: /note="Description of Artificial Sequence: Synthetic oligonucleotide"
auuagcuguauc

SEQ ID NO: 1986 - RNA, 12 nt, Artificial Sequence
  source: /note="Description of Artificial Sequence: Synthetic oligonucleotide"
auacagcuaauu

SEQ ID NO: 1987 - RNA, 12 nt, Artificial Sequence
  source: /note="Description of Artificial Sequence: Synthetic oligonucleotide"
aauuagcuguau

SEQ ID NO: 1988 - RNA, 12 nt, Artificial Sequence
  source: /note="Description of Artificial Sequence: Synthetic oligonucleotide"
uacagcuaauuc

SEQ ID NO: 1989 - RNA, 12 nt, Artificial Sequence
  source: /note="Description of Artificial Sequence: Synthetic oligonucleotide"
gaauuagcugua

SEQ ID NO: 1990 - RNA, 12 nt, Artificial Sequence
  source: /note="Description of Artificial Sequence: Synthetic oligonucleotide"
acagcuaauuca

SEQ ID NO: 1991 - RNA, 12 nt, Artificial Sequence
  source: /note="Description of Artificial Sequence: Synthetic oligonucleotide"
ugaauuagcugu

SEQ ID NO: 1992 - RNA, 12 nt, Artificial Sequence
  source: /note="Description of Artificial Sequence: Synthetic oligonucleotide"
cagcuaauucag

SEQ ID NO: 1993 - RNA, 12 nt, Artificial Sequence
  source: /note="Description of Artificial Sequence: Synthetic oligonucleotide"
cugaauuagcug

SEQ ID NO: 1994 - RNA, 12 nt, Artificial Sequence
  source: /note="Description of Artificial Sequence: Synthetic oligonucleotide"
agcuaauucaga

SEQ ID NO: 1995 - RNA, 12 nt, Artificial Sequence
  source: /note="Description of Artificial Sequence: Synthetic oligonucleotide"
ucugaauuagcu

SEQ ID NO: 1996 - RNA, 12 nt, Artificial Sequence
  source: /note="Description of Artificial Sequence: Synthetic oligonucleotide"
gcuaauucagaa

SEQ ID NO: 1997 - RNA, 12 nt, Artificial Sequence
  source: /note="Description of Artificial Sequence: Synthetic oligonucleotide"
uucugaauuagc

SEQ ID NO: 1998 - RNA, 12 nt, Artificial Sequence
  source: /note="Description of Artificial Sequence: Synthetic oligonucleotide"
cuaauucagaau

SEQ ID NO: 1999 - RNA, 12 nt, Artificial Sequence
  source: /note="Description of Artificial Sequence: Synthetic oligonucleotide"
auucugaauuag

SEQ ID NO: 2000 - RNA, 12 nt, Artificial Sequence
  source: /note="Description of Artificial Sequence: Synthetic oligonucleotide"
uaauucagaauc

SEQ ID NO: 2001 - RNA, 12 nt, Artificial Sequence
  source: /note="Description of Artificial Sequence: Synthetic oligonucleotide"
gauucugaauua

SEQ ID NO: 2002 - RNA, 12 nt, Artificial Sequence
  source: /note="Description of Artificial Sequence: Synthetic oligonucleotide"
aauucagaauca

SEQ ID NO: 2003 - RNA, 12 nt, Artificial Sequence
  source: /note="Description of Artificial Sequence: Synthetic oligonucleotide"
ugauucugaauu

SEQ ID NO: 2004 - RNA, 12 nt, Artificial Sequence
  source: /note="Description of Artificial Sequence: Synthetic oligonucleotide"
auucagaaucau

SEQ ID NO: 2005 - RNA, 12 nt, Artificial Sequence
  source: /note="Description of Artificial Sequence: Synthetic oligonucleotide"
augauucugaau

SEQ ID NO: 2006 - RNA, 12 nt, Artificial Sequence
  source: /note="Description of Artificial Sequence: Synthetic oligonucleotide"
uucagaaucauu

SEQ ID NO: 2007 - RNA, 12 nt, Artificial Sequence
  source: /note="Description of Artificial Sequence: Synthetic oligonucleotide"
aaugauucugaa

SEQ ID NO: 2008 - RNA, 12 nt, Artificial Sequence
  source: /note="Description of Artificial Sequence: Synthetic oligonucleotide"
ucagaaucauuu

SEQ ID NO: 2009 - RNA, 12 nt, Artificial Sequence
  source: /note="Description of Artificial Sequence: Synthetic oligonucleotide"
aaaugauucuga

SEQ ID NO: 2010 - RNA, 12 nt, Artificial Sequence
  source: /note="Description of Artificial Sequence: Synthetic oligonucleotide"
cagaaucauuuu

SEQ ID NO: 2011 - RNA, 12 nt, Artificial Sequence
  source: /note="Description of Artificial Sequence: Synthetic oligonucleotide"
aaaaugauucug

SEQ ID NO: 2012 - RNA, 12 nt, Artificial Sequence
  source: /note="Description of Artificial Sequence: Synthetic oligonucleotide"
agaaucauuuug

SEQ ID NO: 2013 - RNA, 12 nt, Artificial Sequence
  source: /note="Description of Artificial Sequence: Synthetic oligonucleotide"
caaaaugauucu

SEQ ID NO: 2014 - RNA, 12 nt, Artificial Sequence
  source: /note="Description of Artificial Sequence: Synthetic oligonucleotide"
gaaucauuuugu

SEQ ID NO: 2015 - RNA, 12 nt, Artificial Sequence
  source: /note="Description of Artificial Sequence: Synthetic oligonucleotide"
acaaaaugauuc

SEQ ID NO: 2016 - RNA, 12 nt, Artificial Sequence
  source: /note="Description of Artificial Sequence: Synthetic oligonucleotide"
aaucauuuugug

SEQ ID NO: 2017 - RNA, 12 nt, Artificial Sequence
  source: /note="Description of Artificial Sequence: Synthetic oligonucleotide"
cacaaaaugauu

SEQ ID NO: 2018 - RNA, 12 nt, Artificial Sequence
  source: /note="Description of Artificial Sequence: Synthetic oligonucleotide"
aucauuuugugg

SEQ ID NO: 2019 - RNA, 12 nt, Artificial Sequence
  source: /note="Description of Artificial Sequence: Synthetic oligonucleotide"
ccacaaaaugau

SEQ ID NO: 2020 - RNA, 12 nt, Artificial Sequence
  source: /note="Description of Artificial Sequence: Synthetic oligonucleotide"
ucauuuugugga

SEQ ID NO: 2021 - RNA, 12 nt, Artificial Sequence
  source: /note="Description of Artificial Sequence: Synthetic oligonucleotide"
uccacaaaauga

SEQ ID NO: 2022 - RNA, 12 nt, Artificial Sequence
  source: /note="Description of Artificial Sequence: Synthetic oligonucleotide"
cauuuuguggac

SEQ ID NO: 2023 - RNA, 12 nt, Artificial Sequence
  source: /note="Description of Artificial Sequence: Synthetic oligonucleotide"
guccacaaaaug

SEQ ID NO: 2024 - RNA, 12 nt, Artificial Sequence
  source: /note="Description of Artificial Sequence: Synthetic oligonucleotide"
auuuuguggacg

SEQ ID NO: 2025 - RNA, 12 nt, Artificial Sequence
  source: /note="Description of Artificial Sequence: Synthetic oligonucleotide"
cguccacaaaau

SEQ ID NO: 2026 - RNA, 12 nt, Artificial Sequence
  source: /note="Description of Artificial Sequence: Synthetic oligonucleotide"
uuuuguggacga

SEQ ID NO: 2027 - RNA, 12 nt, Artificial Sequence
  source: /note="Description of Artificial Sequence: Synthetic oligonucleotide"
ucguccacaaaa

SEQ ID NO: 2028 - RNA, 12 nt, Artificial Sequence
  source: /note="Description of Artificial Sequence: Synthetic oligonucleotide"
uuuguggacgaa

SEQ ID NO: 2029 - RNA, 12 nt, Artificial Sequence
  source: /note="Description of Artificial Sequence: Synthetic oligonucleotide"
uucguccacaaa

SEQ ID NO: 2030 - RNA, 12 nt, Artificial Sequence
  source: /note="Description of Artificial Sequence: Synthetic oligonucleotide"
uuguggacgaau

SEQ ID NO: 2031 - RNA, 12 nt, Artificial Sequence
  source: /note="Description of Artificial Sequence: Synthetic oligonucleotide"
auucguccacaa

SEQ ID NO: 2032 - RNA, 12 nt, Artificial Sequence
  source: /note="Description of Artificial Sequence: Synthetic oligonucleotide"
uguggacgaaua

SEQ ID NO: 2033 - RNA, 12 nt, Artificial Sequence
  source: /note="Description of Artificial Sequence: Synthetic oligonucleotide"
uauucguccaca

SEQ ID NO: 2034 - RNA, 12 nt, Artificial Sequence
  source: /note="Description of Artificial Sequence: Synthetic oligonucleotide"
guggacgaauau

SEQ ID NO: 2035 - RNA, 12 nt, Artificial Sequence
  source: /note="Description of Artificial Sequence: Synthetic oligonucleotide"
auauucguccac

SEQ ID NO: 2036 - RNA, 12 nt, Artificial Sequence
  source: /note="Description of Artificial Sequence: Synthetic oligonucleotide"
uggacgaauaug

SEQ ID NO: 2037 - RNA, 12 nt, Artificial Sequence
  source: /note="Description of Artificial Sequence: Synthetic oligonucleotide"
cauauucgucca

SEQ ID NO: 2038 - RNA, 12 nt, Artificial Sequence
  source: /note="Description of Artificial Sequence: Synthetic oligonucleotide"
ggacgaauauga

SEQ ID NO: 2039 - RNA, 12 nt, Artificial Sequence
  source: /note="Description of Artificial Sequence: Synthetic oligonucleotide"
ucauauucgucc

SEQ ID NO: 2040 - RNA, 12 nt, Artificial Sequence
  source: /note="Description of Artificial Sequence: Synthetic oligonucleotide"
gacgaauaugau

SEQ ID NO: 2041 - RNA, 12 nt, Artificial Sequence
  source: /note="Description of Artificial Sequence: Synthetic oligonucleotide"
aucauauucguc

SEQ ID NO: 2042 - RNA, 12 nt, Artificial Sequence
  source: /note="Description of Artificial Sequence: Synthetic oligonucleotide"
acgaauaugauc

SEQ ID NO: 2043 - RNA, 12 nt, Artificial Sequence
  source: /note="Description of Artificial Sequence: Synthetic oligonucleotide"
gaucauauucgu

SEQ ID NO: 2044 - RNA, 12 nt, Artificial Sequence
  source: /note="Description of Artificial Sequence: Synthetic oligonucleotide"
cgaauaugaucc

SEQ ID NO: 2045 - RNA, 12 nt, Artificial Sequence
  source: /note="Description of Artificial Sequence: Synthetic oligonucleotide"
ggaucauauucg

SEQ ID NO: 2046 - RNA, 12 nt, Artificial Sequence
  source: /note="Description of Artificial Sequence: Synthetic oligonucleotide"
gaauaugaucca

SEQ ID NO: 2047 - RNA, 12 nt, Artificial Sequence
  source: /note="Description of Artificial Sequence: Synthetic oligonucleotide"
uggaucauauuc

SEQ ID NO: 2048 - RNA, 12 nt, Artificial Sequence
  source: /note="Description of Artificial Sequence: Synthetic oligonucleotide"
aauaugauccaa

SEQ ID NO: 2049 - RNA, 12 nt, Artificial Sequence
  source: /note="Description of Artificial Sequence: Synthetic oligonucleotide"
uuggaucauauu

SEQ ID NO: 2050 - RNA, 12 nt, Artificial Sequence
  source: /note="Description of Artificial Sequence: Synthetic oligonucleotide"
auaugauccaac

SEQ ID NO: 2051 - RNA, 12 nt, Artificial Sequence
  source: /note="Description of Artificial Sequence: Synthetic oligonucleotide"
guuggaucauau

SEQ ID NO: 2052 - RNA, 12 nt, Artificial Sequence
  source: /note="Description of Artificial Sequence: Synthetic oligonucleotide"
uaugauccaaca

SEQ ID NO: 2053 - RNA, 12 nt, Artificial Sequence
  source: /note="Description of Artificial Sequence: Synthetic oligonucleotide"
uguuggaucaua

SEQ ID NO: 2054 - RNA, 12 nt, Artificial Sequence
  source: /note="Description of Artificial Sequence: Synthetic oligonucleotide"
augauccaacaa

SEQ ID NO: 2055 - RNA, 12 nt, Artificial Sequence
  source: /note="Description of Artificial Sequence: Synthetic oligonucleotide"
uuguuggaucau

SEQ ID NO: 2056 - RNA, 12 nt, Artificial Sequence
  source: /note="Description of Artificial Sequence: Synthetic oligonucleotide"
ugauccaacaau

SEQ ID NO: 2057 - RNA, 12 nt, Artificial Sequence
  source: /note="Description of Artificial Sequence: Synthetic oligonucleotide"
auuguuggauca

SEQ ID NO: 2058 - RNA, 12 nt, Artificial Sequence
  source: /note="Description of Artificial Sequence: Synthetic oligonucleotide"
gauccaacaaua

SEQ ID NO: 2059 - RNA, 12 nt, Artificial Sequence
  source: /note="Description of Artificial Sequence: Synthetic oligonucleotide"
uauuguuggauc

SEQ ID NO: 2060 - RNA, 12 nt, Artificial Sequence
  source: /note="Description of Artificial Sequence: Synthetic oligonucleotide"
auccaacaauag

SEQ ID NO: 2061 - RNA, 12 nt, Artificial Sequence
  source: /note="Description of Artificial Sequence: Synthetic oligonucleotide"
cuauuguuggau

SEQ ID NO: 2062 - RNA, 12 nt, Artificial Sequence
  source: /note="Description of Artificial Sequence: Synthetic oligonucleotide"
uccaacaauaga

SEQ ID NO: 2063 - RNA, 12 nt, Artificial Sequence
  source: /note="Description of Artificial Sequence: Synthetic oligonucleotide"
ucuauuguugga

SEQ ID NO: 2064 - RNA, 12 nt, Artificial Sequence
  source: /note="Description of Artificial Sequence: Synthetic oligonucleotide"
ccaacaauagag

SEQ ID NO: 2065 - RNA, 12 nt, Artificial Sequence
  source: /note="Description of Artificial Sequence: Synthetic oligonucleotide"
cucuauuguugg

SEQ ID NO: 2066 - RNA, 12 nt, Artificial Sequence
  source: /note="Description of Artificial Sequence: Synthetic oligonucleotide"
caacaauagagg

SEQ ID NO: 2067 - RNA, 12 nt, Artificial Sequence
  source: /note="Description of Artificial Sequence: Synthetic oligonucleotide"
ccucuauuguug

SEQ ID NO: 2068 - RNA, 12 nt, Artificial Sequence
  source: /note="Description of Artificial Sequence: Synthetic oligonucleotide"
aacaauagagga

SEQ ID NO: 2069 - RNA, 12 nt, Artificial Sequence
  source: /note="Description of Artificial Sequence: Synthetic oligonucleotide"
uccucuauuguu

SEQ ID NO: 2070 - RNA, 12 nt, Artificial Sequence
  source: /note="Description of Artificial Sequence: Synthetic oligonucleotide"
acaauagaggau

SEQ ID NO: 2071 - RNA, 12 nt, Artificial Sequence
  source: /note="Description of Artificial Sequence: Synthetic oligonucleotide"
auccucuauugu

SEQ ID NO: 2072 - RNA, 12 nt, Artificial Sequence
  source: /note="Description of Artificial Sequence: Synthetic oligonucleotide"
caauagaggauu

SEQ ID NO: 2073 - RNA, 12 nt, Artificial Sequence
  source: /note="Description of Artificial Sequence: Synthetic oligonucleotide"
aauccucuauug

SEQ ID NO: 2074 - RNA, 12 nt, Artificial Sequence
  source: /note="Description of Artificial Sequence: Synthetic oligonucleotide"
aauagaggauuc

SEQ ID NO: 2075 - RNA, 12 nt, Artificial Sequence
  source: /note="Description of Artificial Sequence: Synthetic oligonucleotide"
gaauccucuauu

SEQ ID NO: 2076 - RNA, 12 nt, Artificial Sequence
  source: /note="Description of Artificial Sequence: Synthetic oligonucleotide"
auagaggauucc

SEQ ID NO: 2077 - RNA, 12 nt, Artificial Sequence
  source: /note="Description of Artificial Sequence: Synthetic oligonucleotide"
ggaauccucuau

SEQ ID NO: 2078 - RNA, 12 nt, Artificial Sequence
  source: /note="Description of Artificial Sequence: Synthetic oligonucleotide"
uagaggauuccu

SEQ ID NO: 2079 - RNA, 12 nt, Artificial Sequence
  source: /note="Description of Artificial Sequence: Synthetic oligonucleotide"
aggaauccucua

SEQ ID NO: 2080 - RNA, 12 nt, Artificial Sequence
  source: /note="Description of Artificial Sequence: Synthetic oligonucleotide"
agaggauuccua

SEQ ID NO: 2081 - RNA, 12 nt, Artificial Sequence
  source: /note="Description of Artificial Sequence: Synthetic oligonucleotide"
uaggaauccucu

SEQ ID NO: 2082 - RNA, 12 nt, Artificial Sequence
  source: /note="Description of Artificial Sequence: Synthetic oligonucleotide"
gaggauuccuac

SEQ ID NO: 2083 - RNA, 12 nt, Artificial Sequence
  source: /note="Description of Artificial Sequence: Synthetic oligonucleotide"
guaggaauccuc

SEQ ID NO: 2084 - RNA, 12 nt, Artificial Sequence
  source: /note="Description of Artificial Sequence: Synthetic oligonucleotide"
aggauuccuaca

SEQ ID NO: 2085 - RNA, 12 nt, Artificial Sequence
  source: /note="Description of Artificial Sequence: Synthetic oligonucleotide"
uguaggaauccu

SEQ ID NO: 2086 - RNA, 12 nt, Artificial Sequence
  source: /note="Description of Artificial Sequence: Synthetic oligonucleotide"
ggauuccuacag

SEQ ID NO: 2087 - RNA, 12 nt, Artificial Sequence
  source: /note="Description of Artificial Sequence: Synthetic oligonucleotide"
cuguaggaaucc

SEQ ID NO: 2088 - RNA, 12 nt, Artificial Sequence
  source: /note="Description of Artificial Sequence: Synthetic oligonucleotide"
gauuccuacagg

SEQ ID NO: 2089 - RNA, 12 nt, Artificial Sequence
  source: /note="Description of Artificial Sequence: Synthetic oligonucleotide"
ccuguaggaauc

SEQ ID NO: 2090 - RNA, 12 nt, Artificial Sequence
  source: /note="Description of Artificial Sequence: Synthetic oligonucleotide"
auuccuacagga

SEQ ID NO: 2091 - RNA, 12 nt, Artificial Sequence
  source: /note="Description of Artificial Sequence: Synthetic oligonucleotide"
uccuguaggaau

SEQ ID NO: 2092 - RNA, 12 nt, Artificial Sequence
  source: /note="Description of Artificial Sequence: Synthetic oligonucleotide"
uuccuacaggaa

SEQ ID NO: 2093 - RNA, 12 nt, Artificial Sequence
  source: /note="Description of Artificial Sequence: Synthetic oligonucleotide"
uuccuguaggaa

SEQ ID NO: 2094 - RNA, 12 nt, Artificial Sequence
  source: /note="Description of Artificial Sequence: Synthetic oligonucleotide"
uccuacaggaag

SEQ ID NO: 2095 - RNA, 12 nt, Artificial Sequence
  source: /note="Description of Artificial Sequence: Synthetic oligonucleotide"
cuuccuguagga

SEQ ID NO: 2096 - RNA, 12 nt, Artificial Sequence
  source: /note="Description of Artificial Sequence: Synthetic oligonucleotide"
ccuacaggaagc

SEQ ID NO: 2097 - RNA, 12 nt, Artificial Sequence
  source: /note="Description of Artificial Sequence: Synthetic oligonucleotide"
gcuuccuguagg

SEQ ID NO: 2098 - RNA, 12 nt, Artificial Sequence
  source: /note="Description of Artificial Sequence: Synthetic oligonucleotide"
cuacaggaagca

SEQ ID NO: 2099 - RNA, 12 nt, Artificial Sequence
  source: /note="Description of Artificial Sequence: Synthetic oligonucleotide"
ugcuuccuguag

SEQ ID NO: 2100 - RNA, 12 nt, Artificial Sequence
  source: /note="Description of Artificial Sequence: Synthetic oligonucleotide"
uacaggaagcaa

SEQ ID NO: 2101 - RNA, 12 nt, Artificial Sequence
  source: /note="Description of Artificial Sequence: Synthetic oligonucleotide"
uugcuuccugua

SEQ ID NO: 2102 - RNA, 12 nt, Artificial Sequence
  source: /note="Description of Artificial Sequence: Synthetic oligonucleotide"
acaggaagcaag

SEQ ID NO: 2103 - RNA, 12 nt, Artificial Sequence
  source: /note="Description of Artificial Sequence: Synthetic oligonucleotide"
cuugcuuccugu

SEQ ID NO: 2104 - RNA, 12 nt, Artificial Sequence
  source: /note="Description of Artificial Sequence: Synthetic oligonucleotide"
caggaagcaagu

SEQ ID NO: 2105 - RNA, 12 nt, Artificial Sequence
  source: /note="Description of Artificial Sequence: Synthetic oligonucleotide"
acuugcuuccug

SEQ ID NO: 2106 - RNA, 12 nt, Artificial Sequence
  source: /note="Description of Artificial Sequence: Synthetic oligonucleotide"
aggaagcaagua

SEQ ID NO: 2107 - RNA, 12 nt, Artificial Sequence
  source: /note="Description of Artificial Sequence: Synthetic oligonucleotide"
uacuugcuuccu

SEQ ID NO: 2108 - RNA, 12 nt, Artificial Sequence
  source: /note="Description of Artificial Sequence: Synthetic oligonucleotide"
ggaagcaaguag

SEQ ID NO: 2109 - RNA, 12 nt, Artificial Sequence
  source: /note="Description of Artificial Sequence: Synthetic oligonucleotide"
cuacuugcuucc

SEQ ID NO: 2110 - RNA, 12 nt, Artificial Sequence
  source: /note="Description of Artificial Sequence: Synthetic oligonucleotide"
gaagcaaguagu

SEQ ID NO: 2111 - RNA, 12 nt, Artificial Sequence
  source: /note="Description of Artificial Sequence: Synthetic oligonucleotide"
acuacuugcuuc

SEQ ID NO: 2112 - RNA, 12 nt, Artificial Sequence
  source: /note="Description of Artificial Sequence: Synthetic oligonucleotide"
aagcaaguagua

SEQ ID NO: 2113 - RNA, 12 nt, Artificial Sequence
  source: /note="Description of Artificial Sequence: Synthetic oligonucleotide"
uacuacuugcuu

SEQ ID NO: 2114 - RNA, 12 nt, Artificial Sequence
  source: /note="Description of Artificial Sequence: Synthetic oligonucleotide"
agcaaguaguaa

SEQ ID NO: 2115 - RNA, 12 nt, Artificial Sequence
  source: /note="Description of Artificial Sequence: Synthetic oligonucleotide"
uuacuacuugcu

SEQ ID NO: 2116 - RNA, 12 nt, Artificial Sequence
  source: /note="Description of Artificial Sequence: Synthetic oligonucleotide"
gcaaguaguaau

SEQ ID NO: 2117 - RNA, 12 nt, Artificial Sequence
  source: /note="Description of Artificial Sequence: Synthetic oligonucleotide"
auuacuacuugc

SEQ ID NO: 2118 - RNA, 12 nt, Artificial Sequence
  source: /note="Description of Artificial Sequence: Synthetic oligonucleotide"
caaguaguaauu

SEQ ID NO: 2119 - RNA, 12 nt, Artificial Sequence
  source: /note="Description of Artificial Sequence: Synthetic oligonucleotide"
aauuacuacuug

SEQ ID NO: 2120 - RNA, 12 nt, Artificial Sequence
  source: /note="Description of Artificial Sequence: Synthetic oligonucleotide"
aaguaguaauug

SEQ ID NO: 2121 - RNA, 12 nt, Artificial Sequence
  source: /note="Description of Artificial Sequence: Synthetic oligonucleotide"
caauuacuacuu

SEQ ID NO: 2122 - RNA, 12 nt, Artificial Sequence
  source: /note="Description of Artificial Sequence: Synthetic oligonucleotide"
aguaguaauuga

SEQ ID NO: 2123 - RNA, 12 nt, Artificial Sequence
  source: /note="Description of Artificial Sequence: Synthetic oligonucleotide"
ucaauuacuacu

SEQ ID NO: 2124 - RNA, 12 nt, Artificial Sequence
  source: /note="Description of Artificial Sequence: Synthetic oligonucleotide"
guaguaauugau

SEQ ID NO: 2125 - RNA, 12 nt, Artificial Sequence
  source: /note="Description of Artificial Sequence: Synthetic oligonucleotide"
aucaauuacuac

SEQ ID NO: 2126 - RNA, 12 nt, Artificial Sequence
  source: /note="Description of Artificial Sequence: Synthetic oligonucleotide"
uaguaauugaug

SEQ ID NO: 2127 - RNA, 12 nt, Artificial Sequence
  source: /note="Description of Artificial Sequence: Synthetic oligonucleotide"
caucaauuacua

SEQ ID NO: 2128 - RNA, 12 nt, Artificial Sequence
  source: /note="Description of Artificial Sequence: Synthetic oligonucleotide"
aguaauugaugg

SEQ ID NO: 2129 - RNA, 12 nt, Artificial Sequence
  source: /note="Description of Artificial Sequence: Synthetic oligonucleotide"
ccaucaauuacu

SEQ ID NO: 2130 - RNA, 12 nt, Artificial Sequence
  source: /note="Description of Artificial Sequence: Synthetic oligonucleotide"
guaauugaugga

SEQ ID NO: 2131 - RNA, 12 nt, Artificial Sequence
  source: /note="Description of Artificial Sequence: Synthetic oligonucleotide"
uccaucaauuac

SEQ ID NO: 2132 - RNA, 12 nt, Artificial Sequence
  source: /note="Description of Artificial Sequence: Synthetic oligonucleotide"
uaauugauggag

SEQ ID NO: 2133 - RNA, 12 nt, Artificial Sequence
  source: /note="Description of Artificial Sequence: Synthetic oligonucleotide"
cuccaucaauua

SEQ ID NO: 2134 - RNA, 12 nt, Artificial Sequence
  source: /note="Description of Artificial Sequence: Synthetic oligonucleotide"
aauugauggaga

SEQ ID NO: 2135 - RNA, 12 nt, Artificial Sequence
  source: /note="Description of Artificial Sequence: Synthetic oligonucleotide"
ucuccaucaauu

SEQ ID NO: 2136 - RNA, 12 nt, Artificial Sequence
  source: /note="Description of Artificial Sequence: Synthetic oligonucleotide"
auugauggagaa

SEQ ID NO: 2137 - RNA, 12 nt, Artificial Sequence
  source: /note="Description of Artificial Sequence: Synthetic oligonucleotide"
uucuccaucaau

SEQ ID NO: 2138 - RNA, 12 nt, Artificial Sequence
  source: /note="Description of Artificial Sequence: Synthetic oligonucleotide"
uugauggagaaa

SEQ ID NO: 2139 - RNA, 12 nt, Artificial Sequence
  source: /note="Description of Artificial Sequence: Synthetic oligonucleotide"
uuucuccaucaa

SEQ ID NO: 2140 - RNA, 12 nt, Artificial Sequence
  source: /note="Description of Artificial Sequence: Synthetic oligonucleotide"
ugauggagaaac

SEQ ID NO: 2141 - RNA, 12 nt, Artificial Sequence
  source: /note="Description of Artificial Sequence: Synthetic oligonucleotide"
guuucuccauca

SEQ ID NO: 2142 - RNA, 12 nt, Artificial Sequence
  source: /note="Description of Artificial Sequence: Synthetic oligonucleotide"
gauggagaaacc

SEQ ID NO: 2143 - RNA, 12 nt, Artificial Sequence
  source: /note="Description of Artificial Sequence: Synthetic oligonucleotide"
gguuucuccauc

SEQ ID NO: 2144 - RNA, 12 nt, Artificial Sequence
  source: /note="Description of Artificial Sequence: Synthetic oligonucleotide"
auggagaaaccu

SEQ ID NO: 2145 - RNA, 12 nt, Artificial Sequence
  source: /note="Description of Artificial Sequence: Synthetic oligonucleotide"
agguuucuccau

SEQ ID NO: 2146 - RNA, 12 nt, Artificial Sequence
  source: /note="Description of Artificial Sequence: Synthetic oligonucleotide"
uggagaaaccug

SEQ ID NO: 2147 - RNA, 12 nt, Artificial Sequence
  source: /note="Description of Artificial Sequence: Synthetic oligonucleotide"
cagguuucucca

SEQ ID NO: 2148 - RNA, 12 nt, Artificial Sequence
  source: /note="Description of Artificial Sequence: Synthetic oligonucleotide"
ggagaaaccugu

SEQ ID NO: 2149 - RNA, 12 nt, Artificial Sequence
  source: /note="Description of Artificial Sequence: Synthetic oligonucleotide"
acagguuucucc

SEQ ID NO: 2150 - RNA, 12 nt, Artificial Sequence
  source: /note="Description of Artificial Sequence: Synthetic oligonucleotide"
gagaaaccuguc

SEQ ID NO: 2151 - RNA, 12 nt, Artificial Sequence
  source: /note="Description of Artificial Sequence: Synthetic oligonucleotide"
gacagguuucuc

SEQ ID NO: 2152 - RNA, 12 nt, Artificial Sequence
  source: /note="Description of Artificial Sequence: Synthetic oligonucleotide"
agaaaccugucu

SEQ ID NO: 2153 - RNA, 12 nt, Artificial Sequence
  source: /note="Description of Artificial Sequence: Synthetic oligonucleotide"
agacagguuucu

SEQ ID NO: 2154 - RNA, 12 nt, Artificial Sequence
  source: /note="Description of Artificial Sequence: Synthetic oligonucleotide"
gaaaccugucuc

SEQ ID NO: 2155 - RNA, 12 nt, Artificial Sequence
  source: /note="Description of Artificial Sequence: Synthetic oligonucleotide"
gagacagguuuc

SEQ ID NO: 2156 - RNA, 12 nt, Artificial Sequence
  source: /note="Description of Artificial Sequence: Synthetic oligonucleotide"
aaaccugucucu

SEQ ID NO: 2157 - RNA, 12 nt, Artificial Sequence
  source: /note="Description of Artificial Sequence: Synthetic oligonucleotide"
agagacagguuu

SEQ ID NO: 2158 - RNA, 12 nt, Artificial Sequence
  source: /note="Description of Artificial Sequence: Synthetic oligonucleotide"
aaccugucucuu

SEQ ID NO: 2159 - RNA, 12 nt, Artificial Sequence
  source: /note="Description of Artificial Sequence: Synthetic oligonucleotide"
aagagacagguu

SEQ ID NO: 2160 - RNA, 12 nt, Artificial Sequence
  source: /note="Description of Artificial Sequence: Synthetic oligonucleotide"
accugucucuug

SEQ ID NO: 2161 - RNA, 12 nt, Artificial Sequence
  source: /note="Description of Artificial Sequence: Synthetic oligonucleotide"
caagagacaggu

SEQ ID NO: 2162 - RNA, 12 nt, Artificial Sequence
  source: /note="Description of Artificial Sequence: Synthetic oligonucleotide"
ccugucucuugg

SEQ ID NO: 2163 - RNA, 12 nt, Artificial Sequence
  source: /note="Description of Artificial Sequence: Synthetic oligonucleotide"
ccaagagacagg

SEQ ID NO: 2164 - RNA, 12 nt, Artificial Sequence
  source: /note="Description of Artificial Sequence: Synthetic oligonucleotide"
cugucucuugga

SEQ ID NO: 2165 - RNA, 12 nt, Artificial Sequence
  source: /note="Description of Artificial Sequence: Synthetic oligonucleotide"
uccaagagacag

SEQ ID NO: 2166 - RNA, 12 nt, Artificial Sequence
  source: /note="Description of Artificial Sequence: Synthetic oligonucleotide"
ugucucuuggau

SEQ ID NO: 2167 - RNA, 12 nt, Artificial Sequence
  source: /note="Description of Artificial Sequence: Synthetic oligonucleotide"
auccaagagaca

SEQ ID NO: 2168 - RNA, 12 nt, Artificial Sequence
  source: /note="Description of Artificial Sequence: Synthetic oligonucleotide"
gucucuuggaua

SEQ ID NO: 2169 - RNA, 12 nt, Artificial Sequence
  source: /note="Description of Artificial Sequence: Synthetic oligonucleotide"
uauccaagagac

SEQ ID NO: 2170 - RNA, 12 nt, Artificial Sequence
  source: /note="Description of Artificial Sequence: Synthetic oligonucleotide"
ucucuuggauau

SEQ ID NO: 2171 - RNA, 12 nt, Artificial Sequence
  source: /note="Description of Artificial Sequence: Synthetic oligonucleotide"
auauccaagaga

SEQ ID NO: 2172 - RNA, 12 nt, Artificial Sequence
  source: /note="Description of Artificial Sequence: Synthetic oligonucleotide"
cucuuggauauu

SEQ ID NO: 2173 - RNA, 12 nt, Artificial Sequence
  source: /note="Description of Artificial Sequence: Synthetic oligonucleotide"
aauauccaagag

SEQ ID NO: 2174 - RNA, 12 nt, Artificial Sequence
  source: /note="Description of Artificial Sequence: Synthetic oligonucleotide"
ucuuggauauuc

SEQ ID NO: 2175 - RNA, 12 nt, Artificial Sequence
  source: /note="Description of Artificial Sequence: Synthetic oligonucleotide"
gaauauccaaga

SEQ ID NO: 2176 - RNA, 12 nt, Artificial Sequence
  source: /note="Description of Artificial Sequence: Synthetic oligonucleotide"
cuuggauauucu

SEQ ID NO: 2177 - RNA, 12 nt, Artificial Sequence
  source: /note="Description of Artificial Sequence: Synthetic oligonucleotide"
agaauauccaag

SEQ ID NO: 2178 - RNA, 12 nt, Artificial Sequence
  source: /note="Description of Artificial Sequence: Synthetic oligonucleotide"
uuggauauucuc

SEQ ID NO: 2179 - RNA, 12 nt, Artificial Sequence
  source: /note="Description of Artificial Sequence: Synthetic oligonucleotide"
gagaauauccaa

SEQ ID NO: 2180 - RNA, 12 nt, Artificial Sequence
  source: /note="Description of Artificial Sequence: Synthetic oligonucleotide"
uggauauucucg

SEQ ID NO: 2181 - RNA, 12 nt, Artificial Sequence
  source: /note="Description of Artificial Sequence: Synthetic oligonucleotide"
cgagaauaucca

SEQ ID NO: 2182 - RNA, 12 nt, Artificial Sequence
  source: /note="Description of Artificial Sequence: Synthetic oligonucleotide"
ggauauucucga

SEQ ID NO: 2183 - RNA, 12 nt, Artificial Sequence
  source: /note="Description of Artificial Sequence: Synthetic oligonucleotide"
ucgagaauaucc

SEQ ID NO: 2184 - RNA, 12 nt, Artificial Sequence
  source: /note="Description of Artificial Sequence: Synthetic oligonucleotide"
gauauucucgac

SEQ ID NO: 2185 - RNA, 12 nt, Artificial Sequence
  source: /note="Description of Artificial Sequence: Synthetic oligonucleotide"
gucgagaauauc

SEQ ID NO: 2186 - RNA, 12 nt, Artificial Sequence
  source: /note="Description of Artificial Sequence: Synthetic oligonucleotide"
auauucucgaca

SEQ ID NO: 2187 - RNA, 12 nt, Artificial Sequence
  source: /note="Description of Artificial Sequence: Synthetic oligonucleotide"
ugucgagaauau

SEQ ID NO: 2188 - RNA, 12 nt, Artificial Sequence
  source: /note="Description of Artificial Sequence: Synthetic oligonucleotide"
uauucucgacac

SEQ ID NO: 2189 - RNA, 12 nt, Artificial Sequence
  source: /note="Description of Artificial Sequence: Synthetic oligonucleotide"
gugucgagaaua

SEQ ID NO: 2190 - RNA, 12 nt, Artificial Sequence
  source: /note="Description of Artificial Sequence: Synthetic oligonucleotide"
auucucgacaca

SEQ ID NO: 2191 - RNA, 12 nt, Artificial Sequence
  source: /note="Description of Artificial Sequence: Synthetic oligonucleotide"
ugugucgagaau

SEQ ID NO: 2192 - RNA, 12 nt, Artificial Sequence
  source: /note="Description of Artificial Sequence: Synthetic oligonucleotide"
uucucgacacag

SEQ ID NO: 2193 - RNA, 12 nt, Artificial Sequence
  source: /note="Description of Artificial Sequence: Synthetic oligonucleotide"
cugugucgagaa

SEQ ID NO: 2194 - RNA, 12 nt, Artificial Sequence
  source: /note="Description of Artificial Sequence: Synthetic oligonucleotide"
ucucgacacagc

SEQ ID NO: 2195 - RNA, 12 nt, Artificial Sequence
  source: /note="Description of Artificial Sequence: Synthetic oligonucleotide"
gcugugucgaga

SEQ ID NO: 2196 - RNA, 12 nt, Artificial Sequence
  source: /note="Description of Artificial Sequence: Synthetic oligonucleotide"
cucgacacagca

SEQ ID NO: 2197 - RNA, 12 nt, Artificial Sequence
  source: /note="Description of Artificial Sequence: Synthetic oligonucleotide"
ugcugugucgag

SEQ ID NO: 2198 - RNA, 12 nt, Artificial Sequence
  source: /note="Description of Artificial Sequence: Synthetic oligonucleotide"
ucgacacagcag

SEQ ID NO: 2199 - RNA, 12 nt, Artificial Sequence
  source: /note="Description of Artificial Sequence: Synthetic oligonucleotide"
cugcugugucga

SEQ ID NO: 2200 - RNA, 12 nt, Artificial Sequence
  source: /note="Description of Artificial Sequence: Synthetic oligonucleotide"
cgacacagcagg

SEQ ID NO: 2201 - RNA, 12 nt, Artificial Sequence
  source: /note="Description of Artificial Sequence: Synthetic oligonucleotide"
ccugcugugucg

SEQ ID NO: 2202 - RNA, 12 nt, Artificial Sequence
  source: /note="Description of Artificial Sequence: Synthetic oligonucleotide"
gacacagcaggu

SEQ ID NO: 2203 - RNA, 12 nt, Artificial Sequence
  source: /note="Description of Artificial Sequence: Synthetic oligonucleotide"
accugcuguguc

SEQ ID NO: 2204 - RNA, 12 nt, Artificial Sequence
  source: /note="Description of Artificial Sequence: Synthetic oligonucleotide"
acacagcagguc

SEQ ID NO: 2205 - RNA, 12 nt, Artificial Sequence
  source: /note="Description of Artificial Sequence: Synthetic oligonucleotide"
gaccugcugugu

SEQ ID NO: 2206 - RNA, 12 nt, Artificial Sequence
  source: /note="Description of Artificial Sequence: Synthetic oligonucleotide"
cacagcagguca

SEQ ID NO: 2207 - RNA, 12 nt, Artificial Sequence
  source: /note="Description of Artificial Sequence: Synthetic oligonucleotide"
ugaccugcugug

SEQ ID NO: 2208 - RNA, 12 nt, Artificial Sequence
  source: /note="Description of Artificial Sequence: Synthetic oligonucleotide"
acagcaggucaa

SEQ ID NO: 2209 - RNA, 12 nt, Artificial Sequence
  source: /note="Description of Artificial Sequence: Synthetic oligonucleotide"
uugaccugcugu

SEQ ID NO: 2210 - RNA, 12 nt, Artificial Sequence
  source: /note="Description of Artificial Sequence: Synthetic oligonucleotide"
cagcaggucaag

SEQ ID NO: 2211 - RNA, 12 nt, Artificial Sequence
  source: /note="Description of Artificial Sequence: Synthetic oligonucleotide"
cuugaccugcug

SEQ ID NO: 2212 - RNA, 12 nt, Artificial Sequence
  source: /note="Description of Artificial Sequence: Synthetic oligonucleotide"
agcaggucaaga

SEQ ID NO: 2213 - RNA, 12 nt, Artificial Sequence
  source: /note="Description of Artificial Sequence: Synthetic oligonucleotide"
ucuugaccugcu

SEQ ID NO: 2214 - RNA, 12 nt, Artificial Sequence
  source: /note="Description of Artificial Sequence: Synthetic oligonucleotide"
gcaggucaagag

SEQ ID NO: 2215 - RNA, 12 nt, Artificial Sequence
  source: /note="Description of Artificial Sequence: Synthetic oligonucleotide"
cucuugaccugc

SEQ ID NO: 2216 - RNA, 12 nt, Artificial Sequence
  source: /note="Description of Artificial Sequence: Synthetic oligonucleotide"
caggucaagagg

SEQ ID NO: 2217 - RNA, 12 nt, Artificial Sequence
  source: /note="Description of Artificial Sequence: Synthetic oligonucleotide"
ccucuugaccug

SEQ ID NO: 2218 - RNA, 12 nt, Artificial Sequence
  source: /note="Description of Artificial Sequence: Synthetic oligonucleotide"
aggucaagagga

SEQ ID NO: 2219 - RNA, 12 nt, Artificial Sequence
  source: /note="Description of Artificial Sequence: Synthetic oligonucleotide"
uccucuugaccu

SEQ ID NO: 2220 - RNA, 12 nt, Artificial Sequence
  source: /note="Description of Artificial Sequence: Synthetic oligonucleotide"
ggucaagaggag

SEQ ID NO: 2221 - RNA, 12 nt, Artificial Sequence
  source: /note="Description of Artificial Sequence: Synthetic oligonucleotide"
cuccucuugacc

SEQ ID NO: 2222 - RNA, 12 nt, Artificial Sequence
  source: /note="Description of Artificial Sequence: Synthetic oligonucleotide"
gucaagaggagu

SEQ ID NO: 2223 - RNA, 12 nt, Artificial Sequence
  source: /note="Description of Artificial Sequence: Synthetic oligonucleotide"
acuccucuugac

SEQ ID NO: 2224 - RNA, 12 nt, Artificial Sequence
  source: /note="Description of Artificial Sequence: Synthetic oligonucleotide"
ucaagaggagua

SEQ ID NO: 2225 - RNA, 12 nt, Artificial Sequence
  source: /note="Description of Artificial Sequence: Synthetic oligonucleotide"
uacuccucuuga

SEQ ID NO: 2226 - RNA, 12 nt, Artificial Sequence
  source: /note="Description of Artificial Sequence: Synthetic oligonucleotide"
caagaggaguac

SEQ ID NO: 2227 - RNA, 12 nt, Artificial Sequence
  source: /note="Description of Artificial Sequence: Synthetic oligonucleotide"
guacuccucuug

SEQ ID NO: 2228 - RNA, 12 nt, Artificial Sequence
  source: /note="Description of Artificial Sequence: Synthetic oligonucleotide"
aagaggaguaca

SEQ ID NO: 2229 - RNA, 12 nt, Artificial Sequence
  source: /note="Description of Artificial Sequence: Synthetic oligonucleotide"
uguacuccucuu

SEQ ID NO: 2230 - RNA, 12 nt, Artificial Sequence
  source: /note="Description of Artificial Sequence: Synthetic oligonucleotide"
agaggaguacag

SEQ ID NO: 2231 - RNA, 12 nt, Artificial Sequence
  source: /note="Description of Artificial Sequence: Synthetic oligonucleotide"
cuguacuccucu

SEQ ID NO: 2232 - RNA, 12 nt, Artificial Sequence
  source: /note="Description of Artificial Sequence: Synthetic oligonucleotide"
gaggaguacagu

SEQ ID NO: 2233 - RNA, 12 nt, Artificial Sequence
  source: /note="Description of Artificial Sequence: Synthetic oligonucleotide"
acuguacuccuc

SEQ ID NO: 2234 - RNA, 12 nt, Artificial Sequence
  source: /note="Description of Artificial Sequence: Synthetic oligonucleotide"
aggaguacagug

SEQ ID NO: 2235 - RNA, 12 nt, Artificial Sequence
  source: /note="Description of Artificial Sequence: Synthetic oligonucleotide"
cacuguacuccu

SEQ ID NO: 2236 - RNA, 12 nt, Artificial Sequence
  source: /note="Description of Artificial Sequence: Synthetic oligonucleotide"
ggaguacagugc

SEQ ID NO: 2237 - RNA, 12 nt, Artificial Sequence
  source: /note="Description of Artificial Sequence: Synthetic oligonucleotide"
gcacuguacucc

SEQ ID NO: 2238 - RNA, 12 nt, Artificial Sequence
  source: /note="Description of Artificial Sequence: Synthetic oligonucleotide"
gaguacagugca

SEQ ID NO: 2239 - RNA, 12 nt, Artificial Sequence
  source: /note="Description of Artificial Sequence: Synthetic oligonucleotide"
ugcacuguacuc

SEQ ID NO: 2240 - RNA, 12 nt, Artificial Sequence
  source: /note="Description of Artificial Sequence: Synthetic oligonucleotide"
aguacagugcaa

SEQ ID NO: 2241 - RNA, 12 nt, Artificial Sequence
  source: /note="Description of Artificial Sequence: Synthetic oligonucleotide"
uugcacuguacu

SEQ ID NO: 2242 - RNA, 12 nt, Artificial Sequence
  source: /note="Description of Artificial Sequence: Synthetic oligonucleotide"
guacagugcaau

SEQ ID NO: 2243 - RNA, 12 nt, Artificial Sequence
  source: /note="Description of Artificial Sequence: Synthetic oligonucleotide"
auugcacuguac

SEQ ID NO: 2244 - RNA, 12 nt, Artificial Sequence
  source: /note="Description of Artificial Sequence: Synthetic oligonucleotide"
uacagugcaaug

SEQ ID NO: 2245 - RNA, 12 nt, Artificial Sequence
  source: /note="Description of Artificial Sequence: Synthetic oligonucleotide"
cauugcacugua

SEQ ID NO: 2246 - RNA, 12 nt, Artificial Sequence
  source: /note="Description of Artificial Sequence: Synthetic oligonucleotide"
acagugcaauga

SEQ ID NO: 2247 - RNA, 12 nt, Artificial Sequence
  source: /note="Description of Artificial Sequence: Synthetic oligonucleotide"
ucauugcacugu

SEQ ID NO: 2248 - RNA, 12 nt, Artificial Sequence
  source: /note="Description of Artificial Sequence: Synthetic oligonucleotide"
cagugcaaugag

SEQ ID NO: 2249 - RNA, 12 nt, Artificial Sequence
  source: /note="Description of Artificial Sequence: Synthetic oligonucleotide"
cucauugcacug

SEQ ID NO: 2250 - RNA, 12 nt, Artificial Sequence
  source: /note="Description of Artificial Sequence: Synthetic oligonucleotide"
agugcaaugagg

SEQ ID NO: 2251 - RNA, 12 nt, Artificial Sequence
  source: /note="Description of Artificial Sequence: Synthetic oligonucleotide"
ccucauugcacu

SEQ ID NO: 2252 - RNA, 12 nt, Artificial Sequence
  source: /note="Description of Artificial Sequence: Synthetic oligonucleotide"
gugcaaugaggg

SEQ ID NO: 2253 - RNA, 12 nt, Artificial Sequence
  source: /note="Description of Artificial Sequence: Synthetic oligonucleotide"
cccucauugcac

SEQ ID NO: 2254 - RNA, 12 nt, Artificial Sequence
  source: /note="Description of Artificial Sequence: Synthetic oligonucleotide"
ugcaaugaggga

SEQ ID NO: 2255 - RNA, 12 nt, Artificial Sequence
  source: /note="Description of Artificial Sequence: Synthetic oligonucleotide"
ucccucauugca

SEQ ID NO: 2256 - RNA, 12 nt, Artificial Sequence
  source: /note="Description of Artificial Sequence: Synthetic oligonucleotide"
gcaaugagggac

SEQ ID NO: 2257 - RNA, 12 nt, Artificial Sequence
  source: /note="Description of Artificial Sequence: Synthetic oligonucleotide"
gucccucauugc

SEQ ID NO: 2258 - RNA, 12 nt, Artificial Sequence
  source: /note="Description of Artificial Sequence: Synthetic oligonucleotide"
caaugagggacc

SEQ ID NO: 2259 - RNA, 12 nt, Artificial Sequence
  source: /note="Description of Artificial Sequence: Synthetic oligonucleotide"
ggucccucauug

SEQ ID NO: 2260 - RNA, 12 nt, Artificial Sequence
  source: /note="Description of Artificial Sequence: Synthetic oligonucleotide"
aaugagggacca

SEQ ID NO: 2261 - RNA, 12 nt, Artificial Sequence
  source: /note="Description of Artificial Sequence: Synthetic oligonucleotide"
uggucccucauu

SEQ ID NO: 2262 - RNA, 12 nt, Artificial Sequence
  source: /note="Description of Artificial Sequence: Synthetic oligonucleotide"
augagggaccag

SEQ ID NO: 2263 - RNA, 12 nt, Artificial Sequence
  source: /note="Description of Artificial Sequence: Synthetic oligonucleotide"
cuggucccucau

SEQ ID NO: 2264 - RNA, 12 nt, Artificial Sequence
  source: /note="Description of Artificial Sequence: Synthetic oligonucleotide"
ugagggaccagu

SEQ ID NO: 2265 - RNA, 12 nt, Artificial Sequence
  source: /note="Description of Artificial Sequence: Synthetic oligonucleotide"
acuggucccuca

SEQ ID NO: 2266 - RNA, 12 nt, Artificial Sequence
  source: /note="Description of Artificial Sequence: Synthetic oligonucleotide"
gagggaccagua

SEQ ID NO: 2267 - RNA, 12 nt, Artificial Sequence
  source: /note="Description of Artificial Sequence: Synthetic oligonucleotide"
uacuggucccuc

SEQ ID NO: 2268 - RNA, 12 nt, Artificial Sequence
  source: /note="Description of Artificial Sequence: Synthetic oligonucleotide"
agggaccaguac

SEQ ID NO: 2269 - RNA, 12 nt, Artificial Sequence
  source: /note="Description of Artificial Sequence: Synthetic oligonucleotide"
guacuggucccu

SEQ ID NO: 2270 - RNA, 12 nt, Artificial Sequence
  source: /note="Description of Artificial Sequence: Synthetic oligonucleotide"
gggaccaguaca

SEQ ID NO: 2271 - RNA, 12 nt, Artificial Sequence
  source: /note="Description of Artificial Sequence: Synthetic oligonucleotide"
uguacugguccc

SEQ ID NO: 2272 - RNA, 12 nt, Artificial Sequence
  source: /note="Description of Artificial Sequence: Synthetic oligonucleotide"
ggaccaguacau

SEQ ID NO: 2273 - RNA, 12 nt, Artificial Sequence
  source: /note="Description of Artificial Sequence: Synthetic oligonucleotide"
auguacuggucc

SEQ ID NO: 2274 - RNA, 12 nt, Artificial Sequence
  source: /note="Description of Artificial Sequence: Synthetic oligonucleotide"
gaccaguacaug

SEQ ID NO: 2275 - RNA, 12 nt, Artificial Sequence
  source: /note="Description of Artificial Sequence: Synthetic oligonucleotide"
cauguacugguc

SEQ ID NO: 2276 - RNA, 12 nt, Artificial Sequence
  source: /note="Description of Artificial Sequence: Synthetic oligonucleotide"
accaguacauga

SEQ ID NO: 2277 - RNA, 12 nt, Artificial Sequence
  source: /note="Description of Artificial Sequence: Synthetic oligonucleotide"
ucauguacuggu

SEQ ID NO: 2278 - RNA, 12 nt, Artificial Sequence
  source: /note="Description of Artificial Sequence: Synthetic oligonucleotide"
ccaguacaugag

SEQ ID NO: 2279 - RNA, 12 nt, Artificial Sequence
  source: /note="Description of Artificial Sequence: Synthetic oligonucleotide"
cucauguacugg

SEQ ID NO: 2280 - RNA, 12 nt, Artificial Sequence
  source: /note="Description of Artificial Sequence: Synthetic oligonucleotide"
caguacaugagg

SEQ ID NO: 2281 - RNA, 12 nt, Artificial Sequence
  source: /note="Description of Artificial Sequence: Synthetic oligonucleotide"
ccucauguacug

SEQ ID NO: 2282 - RNA, 12 nt, Artificial Sequence
  source: /note="Description of Artificial Sequence: Synthetic oligonucleotide"
aguacaugagga

SEQ ID NO: 2283 - RNA, 12 nt, Artificial Sequence
  source: /note="Description of Artificial Sequence: Synthetic oligonucleotide"
uccucauguacu

SEQ ID NO: 2284 - RNA, 12 nt, Artificial Sequence
  source: /note="Description of Artificial Sequence: Synthetic oligonucleotide"
guacaugaggac

SEQ ID NO: 2285 - RNA, 12 nt, Artificial Sequence
  source: /note="Description of Artificial Sequence: Synthetic oligonucleotide"
guccucauguac

SEQ ID NO: 2286 - RNA, 12 nt, Artificial Sequence
  source: /note="Description of Artificial Sequence: Synthetic oligonucleotide"
uacaugaggacu

SEQ ID NO: 2287 - RNA, 12 nt, Artificial Sequence
  source: /note="Description of Artificial Sequence: Synthetic oligonucleotide"
aguccucaugua

SEQ ID NO: 2288 - RNA, 12 nt, Artificial Sequence
  source: /note="Description of Artificial Sequence: Synthetic oligonucleotide"
acaugaggacug

SEQ ID NO: 2289 - RNA, 12 nt, Artificial Sequence
  source: /note="Description of Artificial Sequence: Synthetic oligonucleotide"
caguccucaugu

SEQ ID NO: 2290 - RNA, 12 nt, Artificial Sequence
  source: /note="Description of Artificial Sequence: Synthetic oligonucleotide"
caugaggacugg

SEQ ID NO: 2291 - RNA, 12 nt, Artificial Sequence
  source: /note="Description of Artificial Sequence: Synthetic oligonucleotide"
ccaguccucaug

SEQ ID NO: 2292 - RNA, 12 nt, Artificial Sequence
  source: /note="Description of Artificial Sequence: Synthetic oligonucleotide"
augaggacuggg

SEQ ID NO: 2293 - RNA, 12 nt, Artificial Sequence
  source: /note="Description of Artificial Sequence: Synthetic oligonucleotide"
cccaguccucau

SEQ ID NO: 2294 - RNA, 12 nt, Artificial Sequence
  source: /note="Description of Artificial Sequence: Synthetic oligonucleotide"
ugaggacugggg

SEQ ID NO: 2295 - RNA, 12 nt, Artificial Sequence
  source: /note="Description of Artificial Sequence: Synthetic oligonucleotide"
ccccaguccuca

SEQ ID NO: 2296 - RNA, 12 nt, Artificial Sequence
  source: /note="Description of Artificial Sequence: Synthetic oligonucleotide"
gaggacugggga

SEQ ID NO: 2297 - RNA, 12 nt, Artificial Sequence
  source: /note="Description of Artificial Sequence: Synthetic oligonucleotide"
uccccaguccuc

SEQ ID NO: 2298 - RNA, 12 nt, Artificial Sequence
  source: /note="Description of Artificial Sequence: Synthetic oligonucleotide"
aggacuggggag

SEQ ID NO: 2299 - RNA, 12 nt, Artificial Sequence
  source: /note="Description of Artificial Sequence: Synthetic oligonucleotide"
cuccccaguccu

SEQ ID NO: 2300 - RNA, 12 nt, Artificial Sequence
  source: /note="Description of Artificial Sequence: Synthetic oligonucleotide"
ggacuggggagg

SEQ ID NO: 2301 - RNA, 12 nt, Artificial Sequence
  source: /note="Description of Artificial Sequence: Synthetic oligonucleotide"
ccuccccagucc

SEQ ID NO: 2302 - RNA, 12 nt, Artificial Sequence
  source: /note="Description of Artificial Sequence: Synthetic oligonucleotide"
gacuggggaggg

SEQ ID NO: 2303 - RNA, 12 nt, Artificial Sequence
  source: /note="Description of Artificial Sequence: Synthetic oligonucleotide"
cccuccccaguc

SEQ ID NO: 2304 - RNA, 12 nt, Artificial Sequence
  source: /note="Description of Artificial Sequence: Synthetic oligonucleotide"
acuggggagggc

SEQ ID NO: 2305 - RNA, 12 nt, Artificial Sequence
  source: /note="Description of Artificial Sequence: Synthetic oligonucleotide"
gcccuccccagu

SEQ ID NO: 2306 - RNA, 12 nt, Artificial Sequence
  source: /note="Description of Artificial Sequence: Synthetic oligonucleotide"
cuggggagggcu

SEQ ID NO: 2307 - RNA, 12 nt, Artificial Sequence
  source: /note="Description of Artificial Sequence: Synthetic oligonucleotide"
agcccuccccag

SEQ ID NO: 2308 - RNA, 12 nt, Artificial Sequence
  source: /note="Description of Artificial Sequence: Synthetic oligonucleotide"
uggggagggcuu

SEQ ID NO: 2309 - RNA, 12 nt, Artificial Sequence
  source: /note="Description of Artificial Sequence: Synthetic oligonucleotide"
aagcccucccca

SEQ ID NO: 2310 - RNA, 12 nt, Artificial Sequence
  source: /note="Description of Artificial Sequence: Synthetic oligonucleotide"
ggggagggcuuu

SEQ ID NO: 2311 - RNA, 12 nt, Artificial Sequence
  source: /note="Description of Artificial Sequence: Synthetic oligonucleotide"
aaagcccucccc

SEQ ID NO: 2312 - RNA, 12 nt, Artificial Sequence
  source: /note="Description of Artificial Sequence: Synthetic oligonucleotide"
gggagggcuuuc

SEQ ID NO: 2313 - RNA, 12 nt, Artificial Sequence
  source: /note="Description of Artificial Sequence: Synthetic oligonucleotide"
gaaagcccuccc

SEQ ID NO: 2314 - RNA, 12 nt, Artificial Sequence
  source: /note="Description of Artificial Sequence: Synthetic oligonucleotide"
ggagggcuuucu

SEQ ID NO: 2315 - RNA, 12 nt, Artificial Sequence
  source: /note="Description of Artificial Sequence: Synthetic oligonucleotide"
agaaagcccucc

SEQ ID NO: 2316 - RNA, 12 nt, Artificial Sequence
  source: /note="Description of Artificial Sequence: Synthetic oligonucleotide"
gagggcuuucuu

SEQ ID NO: 2317 - RNA, 12 nt, Artificial Sequence
  source: /note="Description of Artificial Sequence: Synthetic oligonucleotide"
aagaaagcccuc

SEQ ID NO: 2318 - RNA, 12 nt, Artificial Sequence
  source: /note="Description of Artificial Sequence: Synthetic oligonucleotide"
agggcuuucuuu

SEQ ID NO: 2319 - RNA, 12 nt, Artificial Sequence
  source: /note="Description of Artificial Sequence: Synthetic oligonucleotide"
aaagaaagcccu

SEQ ID NO: 2320 - RNA, 12 nt, Artificial Sequence
  source: /note="Description of Artificial Sequence: Synthetic oligonucleotide"
gggcuuucuuug

SEQ ID NO: 2321 - RNA, 12 nt, Artificial Sequence
  source: /note="Description of Artificial Sequence: Synthetic oligonucleotide"
caaagaaagccc

SEQ ID NO: 2322 - RNA, 12 nt, Artificial Sequence
  source: /note="Description of Artificial Sequence: Synthetic oligonucleotide"
ggcuuucuuugu

SEQ ID NO: 2323 - RNA, 12 nt, Artificial Sequence
  source: /note="Description of Artificial Sequence: Synthetic oligonucleotide"
acaaagaaagcc

SEQ ID NO: 2324 - RNA, 12 nt, Artificial Sequence
  source: /note="Description of Artificial Sequence: Synthetic oligonucleotide"
gcuuucuuugug

SEQ ID NO: 2325 - RNA, 12 nt, Artificial Sequence
  source: /note="Description of Artificial Sequence: Synthetic oligonucleotide"
cacaaagaaagc

SEQ ID NO: 2326 - RNA, 12 nt, Artificial Sequence
  source: /note="Description of Artificial Sequence: Synthetic oligonucleotide"
cuuucuuugugu

SEQ ID NO: 2327 - RNA, 12 nt, Artificial Sequence
  source: /note="Description of Artificial Sequence: Synthetic oligonucleotide"
acacaaagaaag

SEQ ID NO: 2328 - RNA, 12 nt, Artificial Sequence
  source: /note="Description of Artificial Sequence: Synthetic oligonucleotide"
uuucuuugugua

SEQ ID NO: 2329 - RNA, 12 nt, Artificial Sequence
  source: /note="Description of Artificial Sequence: Synthetic oligonucleotide"
uacacaaagaaa

SEQ ID NO: 2330 - RNA, 12 nt, Artificial Sequence
  source: /note="Description of Artificial Sequence: Synthetic oligonucleotide"
uucuuuguguau

SEQ ID NO: 2331 - RNA, 12 nt, Artificial Sequence
  source: /note="Description of Artificial Sequence: Synthetic oligonucleotide"
auacacaaagaa

SEQ ID NO: 2332 - RNA, 12 nt, Artificial Sequence
  source: /note="Description of Artificial Sequence: Synthetic oligonucleotide"
ucuuuguguauu

SEQ ID NO: 2333 - RNA, 12 nt, Artificial Sequence
  source: /note="Description of Artificial Sequence: Synthetic oligonucleotide"
aauacacaaaga

SEQ ID NO: 2334 - RNA, 12 nt, Artificial Sequence
  source: /note="Description of Artificial Sequence: Synthetic oligonucleotide"
cuuuguguauuu

SEQ ID NO: 2335 - RNA, 12 nt, Artificial Sequence
  source: /note="Description of Artificial Sequence: Synthetic oligonucleotide"
aaauacacaaag

SEQ ID NO: 2336 - RNA, 12 nt, Artificial Sequence
  source: /note="Description of Artificial Sequence: Synthetic oligonucleotide"
uuuguguauuug

SEQ ID NO: 2337 - RNA, 12 nt, Artificial Sequence
  source: /note="Description of Artificial Sequence: Synthetic oligonucleotide"
caaauacacaaa

SEQ ID NO: 2338 - RNA, 12 nt, Artificial Sequence
  source: /note="Description of Artificial Sequence: Synthetic oligonucleotide"
uuguguauuugc

SEQ ID NO: 2339 - RNA, 12 nt, Artificial Sequence
  source: /note="Description of Artificial Sequence: Synthetic oligonucleotide"
gcaaauacacaa

SEQ ID NO: 2340 - RNA, 12 nt, Artificial Sequence
  source: /note="Description of Artificial Sequence: Synthetic oligonucleotide"
uguguauuugcc

SEQ ID NO: 2341 - RNA, 12 nt, Artificial Sequence
  source: /note="Description of Artificial Sequence: Synthetic oligonucleotide"
ggcaaauacaca

SEQ ID NO: 2342 - RNA, 12 nt, Artificial Sequence
  source: /note="Description of Artificial Sequence: Synthetic oligonucleotide"
guguauuugcca

SEQ ID NO: 2343 - RNA, 12 nt, Artificial Sequence
  source: /note="Description of Artificial Sequence: Synthetic oligonucleotide"
uggcaaauacac

SEQ ID NO: 2344 - RNA, 12 nt, Artificial Sequence
  source: /note="Description of Artificial Sequence: Synthetic oligonucleotide"
uguauuugccau

SEQ ID NO: 2345 - RNA, 12 nt, Artificial Sequence
  source: /note="Description of Artificial Sequence: Synthetic oligonucleotide"
auggcaaauaca

SEQ ID NO: 2346 - RNA, 12 nt, Artificial Sequence
  source: /note="Description of Artificial Sequence: Synthetic oligonucleotide"
guauuugccaua

SEQ ID NO: 2347 - RNA, 12 nt, Artificial Sequence
  source: /note="Description of Artificial Sequence: Synthetic oligonucleotide"
uauggcaaauac

SEQ ID NO: 2348 - RNA, 12 nt, Artificial Sequence
  source: /note="Description of Artificial Sequence: Synthetic oligonucleotide"
uauuugccauaa

SEQ ID NO: 2349 - RNA, 12 nt, Artificial Sequence
  source: /note="Description of Artificial Sequence: Synthetic oligonucleotide"
uuauggcaaaua

SEQ ID NO: 2350 - RNA, 12 nt, Artificial Sequence
  source: /note="Description of Artificial Sequence: Synthetic oligonucleotide"
auuugccauaaa

SEQ ID NO: 2351 - RNA, 12 nt, Artificial Sequence
  source: /note="Description of Artificial Sequence: Synthetic oligonucleotide"
uuuauggcaaau

SEQ ID NO: 2352 - RNA, 12 nt, Artificial Sequence
  source: /note="Description of Artificial Sequence: Synthetic oligonucleotide"
uuugccauaaau

SEQ ID NO: 2353 - RNA, 12 nt, Artificial Sequence
  source: /note="Description of Artificial Sequence: Synthetic oligonucleotide"
auuuauggcaaa

SEQ ID NO: 2354 - RNA, 12 nt, Artificial Sequence
  source: /note="Description of Artificial Sequence: Synthetic oligonucleotide"
uugccauaaaua

SEQ ID NO: 2355 - RNA, 12 nt, Artificial Sequence
  source: /note="Description of Artificial Sequence: Synthetic oligonucleotide"
uauuuauggcaa

SEQ ID NO: 2356 - RNA, 12 nt, Artificial Sequence
  source: /note="Description of Artificial Sequence: Synthetic oligonucleotide"
ugccauaaauaa

SEQ ID NO: 2357 - RNA, 12 nt, Artificial Sequence
  source: /note="Description of Artificial Sequence: Synthetic oligonucleotide"
uuauuuauggca

SEQ ID NO: 2358 - RNA, 12 nt, Artificial Sequence
  source: /note="Description of Artificial Sequence: Synthetic oligonucleotide"
gccauaaauaau

SEQ ID NO: 2359 - RNA, 12 nt, Artificial Sequence
  source: /note="Description of Artificial Sequence: Synthetic oligonucleotide"
auuauuuauggc

SEQ ID NO: 2360 - RNA, 12 nt, Artificial Sequence
  source: /note="Description of Artificial Sequence: Synthetic oligonucleotide"
ccauaaauaaua

SEQ ID NO: 2361 - RNA, 12 nt, Artificial Sequence
  source: /note="Description of Artificial Sequence: Synthetic oligonucleotide"
uauuauuuaugg

SEQ ID NO: 2362 - RNA, 12 nt, Artificial Sequence
  source: /note="Description of Artificial Sequence: Synthetic oligonucleotide"
cauaaauaauac

SEQ ID NO: 2363 - RNA, 12 nt, Artificial Sequence
  source: /note="Description of Artificial Sequence: Synthetic oligonucleotide"
guauuauuuaug

SEQ ID NO: 2364 - RNA, 12 nt, Artificial Sequence
  source: /note="Description of Artificial Sequence: Synthetic oligonucleotide"
auaaauaauacu

SEQ ID NO: 2365 - RNA, 12 nt, Artificial Sequence
  source: /note="Description of Artificial Sequence: Synthetic oligonucleotide"
aguauuauuuau

SEQ ID NO: 2366 - RNA, 12 nt, Artificial Sequence
  source: /note="Description of Artificial Sequence: Synthetic oligonucleotide"
uaaauaauacua

SEQ ID NO: 2367 - RNA, 12 nt, Artificial Sequence
  source: /note="Description of Artificial Sequence: Synthetic oligonucleotide"
uaguauuauuua

SEQ ID NO: 2368 - RNA, 12 nt, Artificial Sequence
  source: /note="Description of Artificial Sequence: Synthetic oligonucleotide"
aaauaauacuaa

SEQ ID NO: 2369 - RNA, 12 nt, Artificial Sequence
  source: /note="Description of Artificial Sequence: Synthetic oligonucleotide"
uuaguauuauuu

SEQ ID NO: 2370 - RNA, 12 nt, Artificial Sequence
  source: /note="Description of Artificial Sequence: Synthetic oligonucleotide"
aauaauacuaaa

SEQ ID NO: 2371 - RNA, 12 nt, Artificial Sequence
  source: /note="Description of Artificial Sequence: Synthetic oligonucleotide"
uuuaguauuauu

SEQ ID NO: 2372 - RNA, 12 nt, Artificial Sequence
  source: /note="Description of Artificial Sequence: Synthetic oligonucleotide"
auaauacuaaau

SEQ ID NO: 2373 - RNA, 12 nt, Artificial Sequence
  source: /note="Description of Artificial Sequence: Synthetic oligonucleotide"
auuuaguauuau

SEQ ID NO: 2374 - RNA, 12 nt, Artificial Sequence
  source: /note="Description of Artificial Sequence: Synthetic oligonucleotide"
uaauacuaaauc

SEQ ID NO: 2375 - RNA, 12 nt, Artificial Sequence
  source: /note="Description of Artificial Sequence: Synthetic oligonucleotide"
gauuuaguauua

SEQ ID NO: 2376 - RNA, 12 nt, Artificial Sequence
  source: /note="Description of Artificial Sequence: Synthetic oligonucleotide"
aauacuaaauca

SEQ ID NO: 2377 - RNA, 12 nt, Artificial Sequence
  source: /note="Description of Artificial Sequence: Synthetic oligonucleotide"
ugauuuaguauu

SEQ ID NO: 2378 - RNA, 12 nt, Artificial Sequence
  source: /note="Description of Artificial Sequence: Synthetic oligonucleotide"
auacuaaaucau

SEQ ID NO: 2379 - RNA, 12 nt, Artificial Sequence
  source: /note="Description of Artificial Sequence: Synthetic oligonucleotide"
augauuuaguau

SEQ ID NO: 2380 - RNA, 12 nt, Artificial Sequence
  source: /note="Description of Artificial Sequence: Synthetic oligonucleotide"
uacuaaaucauu

SEQ ID NO: 2381 - RNA, 12 nt, Artificial Sequence
  source: /note="Description of Artificial Sequence: Synthetic oligonucleotide"
aaugauuuagua

SEQ ID NO: 2382 - RNA, 12 nt, Artificial Sequence
  source: /note="Description of Artificial Sequence: Synthetic oligonucleotide"
acuaaaucauuu

SEQ ID NO: 2383 - RNA, 12 nt, Artificial Sequence
  source: /note="Description of Artificial Sequence: Synthetic oligonucleotide"
aaaugauuuagu

SEQ ID NO: 2384 - RNA, 12 nt, Artificial Sequence
  source: /note="Description of Artificial Sequence: Synthetic oligonucleotide"
cuaaaucauuug

SEQ ID NO: 2385 - RNA, 12 nt, Artificial Sequence
  source: /note="Description of Artificial Sequence: Synthetic oligonucleotide"
caaaugauuuag

SEQ ID NO: 2386 - RNA, 12 nt, Artificial Sequence
  source: /note="Description of Artificial Sequence: Synthetic oligonucleotide"
uaaaucauuuga

SEQ ID NO: 2387 - RNA, 12 nt, Artificial Sequence
  source: /note="Description of Artificial Sequence: Synthetic oligonucleotide"
ucaaaugauuua

SEQ ID NO: 2388 - RNA, 12 nt, Artificial Sequence
  source: /note="Description of Artificial Sequence: Synthetic oligonucleotide"
aaaucauuugaa

SEQ ID NO: 2389 - RNA, 12 nt, Artificial Sequence
  source: /note="Description of Artificial Sequence: Synthetic oligonucleotide"
uucaaaugauuu

SEQ ID NO: 2390 - RNA, 12 nt, Artificial Sequence
  source: /note="Description of Artificial Sequence: Synthetic oligonucleotide"
aaucauuugaag

SEQ ID NO: 2391 - RNA, 12 nt, Artificial Sequence
  source: /note="Description of Artificial Sequence: Synthetic oligonucleotide"
cuucaaaugauu

SEQ ID NO: 2392 - RNA, 12 nt, Artificial Sequence
  source: /note="Description of Artificial Sequence: Synthetic oligonucleotide"
aucauuugaaga

SEQ ID NO: 2393 - RNA, 12 nt, Artificial Sequence
  source: /note="Description of Artificial Sequence: Synthetic oligonucleotide"
ucuucaaaugau

SEQ ID NO: 2394 - RNA, 12 nt, Artificial Sequence
  source: /note="Description of Artificial Sequence: Synthetic oligonucleotide"
ucauuugaagau

SEQ ID NO: 2395 - RNA, 12 nt, Artificial Sequence
  source: /note="Description of Artificial Sequence: Synthetic oligonucleotide"
aucuucaaauga

SEQ ID NO: 2396 - RNA, 12 nt, Artificial Sequence
  source: /note="Description of Artificial Sequence: Synthetic oligonucleotide"
cauuugaagaua

SEQ ID NO: 2397 - RNA, 12 nt, Artificial Sequence
  source: /note="Description of Artificial Sequence: Synthetic oligonucleotide"
uaucuucaaaug

SEQ ID NO: 2398 - RNA, 12 nt, Artificial Sequence
  source: /note="Description of Artificial Sequence: Synthetic oligonucleotide"
auuugaagauau

SEQ ID NO: 2399 - RNA, 12 nt, Artificial Sequence
  source: /note="Description of Artificial Sequence: Synthetic oligonucleotide"
auaucuucaaau

SEQ ID NO: 2400 - RNA, 12 nt, Artificial Sequence
  source: /note="Description of Artificial Sequence: Synthetic oligonucleotide"
uuugaagauauu

SEQ ID NO: 2401 - RNA, 12 nt, Artificial Sequence
  source: /note="Description of Artificial Sequence: Synthetic oligonucleotide"
aauaucuucaaa

SEQ ID NO: 2402 - RNA, 12 nt, Artificial Sequence
  source: /note="Description of Artificial Sequence: Synthetic oligonucleotide"
uugaagauauuc

SEQ ID NO: 2403 - RNA, 12 nt, Artificial Sequence
  source: /note="Description of Artificial Sequence: Synthetic oligonucleotide"
gaauaucuucaa

SEQ ID NO: 2404 - RNA, 12 nt, Artificial Sequence
  source: /note="Description of Artificial Sequence: Synthetic oligonucleotide"
ugaagauauuca

SEQ ID NO: 2405 - RNA, 12 nt, Artificial Sequence
  source: /note="Description of Artificial Sequence: Synthetic oligonucleotide"
ugaauaucuuca

SEQ ID NO: 2406 - RNA, 12 nt, Artificial Sequence
  source: /note="Description of Artificial Sequence: Synthetic oligonucleotide"
gaagauauucac

SEQ ID NO: 2407 - RNA, 12 nt, Artificial Sequence
  source: /note="Description of Artificial Sequence: Synthetic oligonucleotide"
gugaauaucuuc

SEQ ID NO: 2408 - RNA, 12 nt, Artificial Sequence
  source: /note="Description of Artificial Sequence: Synthetic oligonucleotide"
aagauauucacc

SEQ ID NO: 2409 - RNA, 12 nt, Artificial Sequence
  source: /note="Description of Artificial Sequence: Synthetic oligonucleotide"
ggugaauaucuu

SEQ ID NO: 2410 - RNA, 12 nt, Artificial Sequence
  source: /note="Description of Artificial Sequence: Synthetic oligonucleotide"
agauauucacca

SEQ ID NO: 2411 - RNA, 12 nt, Artificial Sequence
  source: /note="Description of Artificial Sequence: Synthetic oligonucleotide"
uggugaauaucu

SEQ ID NO: 2412 - RNA, 12 nt, Artificial Sequence
  source: /note="Description of Artificial Sequence: Synthetic oligonucleotide"
gauauucaccau

SEQ ID NO: 2413 - RNA, 12 nt, Artificial Sequence
  source: /note="Description of Artificial Sequence: Synthetic oligonucleotide"
auggugaauauc

SEQ ID NO: 2414 - RNA, 12 nt, Artificial Sequence
  source: /note="Description of Artificial Sequence: Synthetic oligonucleotide"
auauucaccauu

SEQ ID NO: 2415 - RNA, 12 nt, Artificial Sequence
  source: /note="Description of Artificial Sequence: Synthetic oligonucleotide"
aauggugaauau

SEQ ID NO: 2416 - RNA, 12 nt, Artificial Sequence
  source: /note="Description of Artificial Sequence: Synthetic oligonucleotide"
uauucaccauua

SEQ ID NO: 2417 - RNA, 12 nt, Artificial Sequence
  source: /note="Description of Artificial Sequence: Synthetic oligonucleotide"
uaauggugaaua

SEQ ID NO: 2418 - RNA, 12 nt, Artificial Sequence
  source: /note="Description of Artificial Sequence: Synthetic oligonucleotide"
auucaccauuau

SEQ ID NO: 2419 - RNA, 12 nt, Artificial Sequence
  source: /note="Description of Artificial Sequence: Synthetic oligonucleotide"
auaauggugaau

SEQ ID NO: 2420 - RNA, 12 nt, Artificial Sequence
  source: /note="Description of Artificial Sequence: Synthetic oligonucleotide"
uucaccauuaua

SEQ ID NO: 2421 - RNA, 12 nt, Artificial Sequence
  source: /note="Description of Artificial Sequence: Synthetic oligonucleotide"
uauaauggugaa

SEQ ID NO: 2422 - RNA, 12 nt, Artificial Sequence
  source: /note="Description of Artificial Sequence: Synthetic oligonucleotide"
ucaccauuauag

SEQ ID NO: 2423 - RNA, 12 nt, Artificial Sequence
  source: /note="Description of Artificial Sequence: Synthetic oligonucleotide"
cuauaaugguga

SEQ ID NO: 2424 - RNA, 12 nt, Artificial Sequence
  source: /note="Description of Artificial Sequence: Synthetic oligonucleotide"
caccauuauaga

SEQ ID NO: 2425 - RNA, 12 nt, Artificial Sequence
  source: /note="Description of Artificial Sequence: Synthetic oligonucleotide"
ucuauaauggug

SEQ ID NO: 2426 - RNA, 12 nt, Artificial Sequence
  source: /note="Description of Artificial Sequence: Synthetic oligonucleotide"
accauuauagag

SEQ ID NO: 2427 - RNA, 12 nt, Artificial Sequence
  source: /note="Description of Artificial Sequence: Synthetic oligonucleotide"
cucuauaauggu

SEQ ID NO: 2428 - RNA, 12 nt, Artificial Sequence
  source: /note="Description of Artificial Sequence: Synthetic oligonucleotide"
ccauuauagaga

SEQ ID NO: 2429 - RNA, 12 nt, Artificial Sequence
  source: /note="Description of Artificial Sequence: Synthetic oligonucleotide"
ucucuauaaugg

SEQ ID NO: 2430 - RNA, 12 nt, Artificial Sequence
  source: /note="Description of Artificial Sequence: Synthetic oligonucleotide"
cauuauagagaa

SEQ ID NO: 2431 - RNA, 12 nt, Artificial Sequence
  source: /note="Description of Artificial Sequence: Synthetic oligonucleotide"
uucucuauaaug

SEQ ID NO: 2432 - RNA, 12 nt, Artificial Sequence
  source: /note="Description of Artificial Sequence: Synthetic oligonucleotide"
auuauagagaac

SEQ ID NO: 2433 - RNA, 12 nt, Artificial Sequence
  source: /note="Description of Artificial Sequence: Synthetic oligonucleotide"
guucucuauaau

SEQ ID NO: 2434 - RNA, 12 nt, Artificial Sequence
  source: /note="Description of Artificial Sequence: Synthetic oligonucleotide"
uuauagagaaca

SEQ ID NO: 2435 - RNA, 12 nt, Artificial Sequence
  source: /note="Description of Artificial Sequence: Synthetic oligonucleotide"
uguucucuauaa

SEQ ID NO: 2436 - RNA, 12 nt, Artificial Sequence
  source: /note="Description of Artificial Sequence: Synthetic oligonucleotide"
uauagagaacaa

SEQ ID NO: 2437 - RNA, 12 nt, Artificial Sequence
  source: /note="Description of Artificial Sequence: Synthetic oligonucleotide"
uuguucucuaua

SEQ ID NO: 2438 - RNA, 12 nt, Artificial Sequence
  source: /note="Description of Artificial Sequence: Synthetic oligonucleotide"
auagagaacaaa

SEQ ID NO: 2439 - RNA, 12 nt, Artificial Sequence
  source: /note="Description of Artificial Sequence: Synthetic oligonucleotide"
uuuguucucuau

SEQ ID NO: 2440 - RNA, 12 nt, Artificial Sequence
  source: /note="Description of Artificial Sequence: Synthetic oligonucleotide"
uagagaacaaau

SEQ ID NO: 2441 - RNA, 12 nt, Artificial Sequence
  source: /note="Description of Artificial Sequence: Synthetic oligonucleotide"
auuuguucucua

SEQ ID NO: 2442 - RNA, 12 nt, Artificial Sequence
  source: /note="Description of Artificial Sequence: Synthetic oligonucleotide"
agagaacaaauu

SEQ ID NO: 2443 - RNA, 12 nt, Artificial Sequence
  source: /note="Description of Artificial Sequence: Synthetic oligonucleotide"
aauuuguucucu

SEQ ID NO: 2444 - RNA, 12 nt, Artificial Sequence
  source: /note="Description of Artificial Sequence: Synthetic oligonucleotide"
gagaacaaauua

SEQ ID NO: 2445 - RNA, 12 nt, Artificial Sequence
  source: /note="Description of Artificial Sequence: Synthetic oligonucleotide"
uaauuuguucuc

SEQ ID NO: 2446 - RNA, 12 nt, Artificial Sequence
  source: /note="Description of Artificial Sequence: Synthetic oligonucleotide"
agaacaaauuaa

SEQ ID NO: 2447 - RNA, 12 nt, Artificial Sequence
  source: /note="Description of Artificial Sequence: Synthetic oligonucleotide"
uuaauuuguucu

SEQ ID NO: 2448 - RNA, 12 nt, Artificial Sequence
  source: /note="Description of Artificial Sequence: Synthetic oligonucleotide"
gaacaaauuaaa

SEQ ID NO: 2449 - RNA, 12 nt, Artificial Sequence
  source: /note="Description of Artificial Sequence: Synthetic oligonucleotide"
uuuaauuuguuc

SEQ ID NO: 2450 - RNA, 12 nt, Artificial Sequence
  source: /note="Description of Artificial Sequence: Synthetic oligonucleotide"
aacaaauuaaaa

SEQ ID NO: 2451 - RNA, 12 nt, Artificial Sequence
  source: /note="Description of Artificial Sequence: Synthetic oligonucleotide"
uuuuaauuuguu

SEQ ID NO: 2452 - RNA, 12 nt, Artificial Sequence
  source: /note="Description of Artificial Sequence: Synthetic oligonucleotide"
acaaauuaaaag

SEQ ID NO: 2453 - RNA, 12 nt, Artificial Sequence
  source: /note="Description of Artificial Sequence: Synthetic oligonucleotide"
cuuuuaauuugu

SEQ ID NO: 2454 - RNA, 12 nt, Artificial Sequence
  source: /note="Description of Artificial Sequence: Synthetic oligonucleotide"
caaauuaaaaga

SEQ ID NO: 2455 - RNA, 12 nt, Artificial Sequence
  source: /note="Description of Artificial Sequence: Synthetic oligonucleotide"
ucuuuuaauuug

SEQ ID NO: 2456 - RNA, 12 nt, Artificial Sequence
  source: /note="Description of Artificial Sequence: Synthetic oligonucleotide"
aaauuaaaagag

SEQ ID NO: 2457 - RNA, 12 nt, Artificial Sequence
  source: /note="Description of Artificial Sequence: Synthetic oligonucleotide"
cucuuuuaauuu

SEQ ID NO: 2458 - RNA, 12 nt, Artificial Sequence
  source: /note="Description of Artificial Sequence: Synthetic oligonucleotide"
aauuaaaagagu

SEQ ID NO: 2459 - RNA, 12 nt, Artificial Sequence
  source: /note="Description of Artificial Sequence: Synthetic oligonucleotide"
acucuuuuaauu

SEQ ID NO: 2460 - RNA, 12 nt, Artificial Sequence
  source: /note="Description of Artificial Sequence: Synthetic oligonucleotide"
auuaaaagaguu

SEQ ID NO: 2461 - RNA, 12 nt, Artificial Sequence
  source: /note="Description of Artificial Sequence: Synthetic oligonucleotide"
aacucuuuuaau

SEQ ID NO: 2462 - RNA, 12 nt, Artificial Sequence
  source: /note="Description of Artificial Sequence: Synthetic oligonucleotide"
uuaaaagaguua

SEQ ID NO: 2463 - RNA, 12 nt, Artificial Sequence
  source: /note="Description of Artificial Sequence: Synthetic oligonucleotide"
uaacucuuuuaa

SEQ ID NO: 2464 - RNA, 12 nt, Artificial Sequence
  source: /note="Description of Artificial Sequence: Synthetic oligonucleotide"
uaaaagaguuaa

SEQ ID NO: 2465 - RNA, 12 nt, Artificial Sequence
  source: /note="Description of Artificial Sequence: Synthetic oligonucleotide"
uuaacucuuuua

SEQ ID NO: 2466 - RNA, 12 nt, Artificial Sequence
  source: /note="Description of Artificial Sequence: Synthetic oligonucleotide"
aaaagaguuaag

SEQ ID NO: 2467 - RNA, 12 nt, Artificial Sequence
  source: /note="Description of Artificial Sequence: Synthetic oligonucleotide"
cuuaacucuuuu

SEQ ID NO: 2468 - RNA, 12 nt, Artificial Sequence
  source: /note="Description of Artificial Sequence: Synthetic oligonucleotide"
aaagaguuaagg

SEQ ID NO: 2469 - RNA, 12 nt, Artificial Sequence
  source: /note="Description of Artificial Sequence: Synthetic oligonucleotide"
ccuuaacucuuu

SEQ ID NO: 2470 - RNA, 12 nt, Artificial Sequence
  source: /note="Description of Artificial Sequence: Synthetic oligonucleotide"
aagaguuaagga

SEQ ID NO: 2471 - RNA, 12 nt, Artificial Sequence
  source: /note="Description of Artificial Sequence: Synthetic oligonucleotide"
uccuuaacucuu

SEQ ID NO: 2472 - RNA, 12 nt, Artificial Sequence
  source: /note="Description of Artificial Sequence: Synthetic oligonucleotide"
agaguuaaggac

SEQ ID NO: 2473 - RNA, 12 nt, Artificial Sequence
  source: /note="Description of Artificial Sequence: Synthetic oligonucleotide"
guccuuaacucu

SEQ ID NO: 2474 - RNA, 12 nt, Artificial Sequence
  source: /note="Description of Artificial Sequence: Synthetic oligonucleotide"
gaguuaaggacu

SEQ ID NO: 2475 - RNA, 12 nt, Artificial Sequence
  source: /note="Description of Artificial Sequence: Synthetic oligonucleotide"
aguccuuaacuc

SEQ ID NO: 2476 - RNA, 12 nt, Artificial Sequence
  source: /note="Description of Artificial Sequence: Synthetic oligonucleotide"
aguuaaggacuc

SEQ ID NO: 2477 - RNA, 12 nt, Artificial Sequence
  source: /note="Description of Artificial Sequence: Synthetic oligonucleotide"
gaguccuuaacu

SEQ ID NO: 2478 - RNA, 12 nt, Artificial Sequence
  source: /note="Description of Artificial Sequence: Synthetic oligonucleotide"
guuaaggacucu

SEQ ID NO: 2479 - RNA, 12 nt, Artificial Sequence
  source: /note="Description of Artificial Sequence: Synthetic oligonucleotide"
agaguccuuaac

SEQ ID NO: 2480 - RNA, 12 nt, Artificial Sequence
  source: /note="Description of Artificial Sequence: Synthetic oligonucleotide"
uuaaggacucug

SEQ ID NO: 2481 - RNA, 12 nt, Artificial Sequence
  source: /note="Description of Artificial Sequence: Synthetic oligonucleotide"
cagaguccuuaa

SEQ ID NO: 2482 - RNA, 12 nt, Artificial Sequence
  source: /note="Description of Artificial Sequence: Synthetic oligonucleotide"
uaaggacucuga

SEQ ID NO: 2483 - RNA, 12 nt, Artificial Sequence
  source: /note="Description of Artificial Sequence: Synthetic oligonucleotide"
ucagaguccuua

SEQ ID NO: 2484 - RNA, 12 nt, Artificial Sequence
  source: /note="Description of Artificial Sequence: Synthetic oligonucleotide"
aaggacucugaa

SEQ ID NO: 2485 - RNA, 12 nt, Artificial Sequence
  source: /note="Description of Artificial Sequence: Synthetic oligonucleotide"
uucagaguccuu

SEQ ID NO: 2486 - RNA, 12 nt, Artificial Sequence
  source: /note="Description of Artificial Sequence: Synthetic oligonucleotide"
aggacucugaag

SEQ ID NO: 2487 - RNA, 12 nt, Artificial Sequence
  source: /note="Description of Artificial Sequence: Synthetic oligonucleotide"
cuucagaguccu

SEQ ID NO: 2488 - RNA, 12 nt, Artificial Sequence
  source: /note="Description of Artificial Sequence: Synthetic oligonucleotide"
ggacucugaaga

SEQ ID NO: 2489 - RNA, 12 nt, Artificial Sequence
  source: /note="Description of Artificial Sequence: Synthetic oligonucleotide"
ucuucagagucc

SEQ ID NO: 2490 - RNA, 12 nt, Artificial Sequence
  source: /note="Description of Artificial Sequence: Synthetic oligonucleotide"
gacucugaagau

SEQ ID NO: 2491 - RNA, 12 nt, Artificial Sequence
  source: /note="Description of Artificial Sequence: Synthetic oligonucleotide"
aucuucagaguc

SEQ ID NO: 2492 - RNA, 12 nt, Artificial Sequence
  source: /note="Description of Artificial Sequence: Synthetic oligonucleotide"
acucugaagaug

SEQ ID NO: 2493 - RNA, 12 nt, Artificial Sequence
  source: /note="Description of Artificial Sequence: Synthetic oligonucleotide"
caucuucagagu

SEQ ID NO: 2494 - RNA, 12 nt, Artificial Sequence
  source: /note="Description of Artificial Sequence: Synthetic oligonucleotide"
cucugaagaugu

SEQ ID NO: 2495 - RNA, 12 nt, Artificial Sequence
  source: /note="Description of Artificial Sequence: Synthetic oligonucleotide"
acaucuucagag

SEQ ID NO: 2496 - RNA, 12 nt, Artificial Sequence
  source: /note="Description of Artificial Sequence: Synthetic oligonucleotide"
ucugaagaugua

SEQ ID NO: 2497 - RNA, 12 nt, Artificial Sequence
  source: /note="Description of Artificial Sequence: Synthetic oligonucleotide"
uacaucuucaga

SEQ ID NO: 2498 - RNA, 12 nt, Artificial Sequence
  source: /note="Description of Artificial Sequence: Synthetic oligonucleotide"
cugaagauguac

SEQ ID NO: 2499 - RNA, 12 nt, Artificial Sequence
  source: /note="Description of Artificial Sequence: Synthetic oligonucleotide"
guacaucuucag

SEQ ID NO: 2500 - RNA, 12 nt, Artificial Sequence
  source: /note="Description of Artificial Sequence: Synthetic oligonucleotide"
ugaagauguacc

SEQ ID NO: 2501 - RNA, 12 nt, Artificial Sequence
  source: /note="Description of Artificial Sequence: Synthetic oligonucleotide"
gguacaucuuca

SEQ ID NO: 2502 - RNA, 12 nt, Artificial Sequence
  source: /note="Description of Artificial Sequence: Synthetic oligonucleotide"
gaagauguaccu

SEQ ID NO: 2503 - RNA, 12 nt, Artificial Sequence
  source: /note="Description of Artificial Sequence: Synthetic oligonucleotide"
agguacaucuuc

SEQ ID NO: 2504 - RNA, 12 nt, Artificial Sequence
  source: /note="Description of Artificial Sequence: Synthetic oligonucleotide"
aagauguaccua

SEQ ID NO: 2505 - RNA, 12 nt, Artificial Sequence
  source: /note="Description of Artificial Sequence: Synthetic oligonucleotide"
uagguacaucuu

SEQ ID NO: 2506 - RNA, 12 nt, Artificial Sequence
  source: /note="Description of Artificial Sequence: Synthetic oligonucleotide"
agauguaccuau

SEQ ID NO: 2507 - RNA, 12 nt, Artificial Sequence
  source: /note="Description of Artificial Sequence: Synthetic oligonucleotide"
auagguacaucu

SEQ ID NO: 2508 - RNA, 12 nt, Artificial Sequence
  source: /note="Description of Artificial Sequence: Synthetic oligonucleotide"
gauguaccuaug

SEQ ID NO: 2509 - RNA, 12 nt, Artificial Sequence
  source: /note="Description of Artificial Sequence: Synthetic oligonucleotide"
cauagguacauc

SEQ ID NO: 2510 - RNA, 12 nt, Artificial Sequence
  source: /note="Description of Artificial Sequence: Synthetic oligonucleotide"
auguaccuaugg

SEQ ID NO: 2511 - RNA, 12 nt, Artificial Sequence
  source: /note="Description of Artificial Sequence: Synthetic oligonucleotide"
ccauagguacau

SEQ ID NO: 2512 - RNA, 12 nt, Artificial Sequence
  source: /note="Description of Artificial Sequence: Synthetic oligonucleotide"
uguaccuauggu

SEQ ID NO: 2513 - RNA, 12 nt, Artificial Sequence
  source: /note="Description of Artificial Sequence: Synthetic oligonucleotide"
accauagguaca

SEQ ID NO: 2514 - RNA, 12 nt, Artificial Sequence
  source: /note="Description of Artificial Sequence: Synthetic oligonucleotide"
guaccuaugguc

SEQ ID NO: 2515 - RNA, 12 nt, Artificial Sequence
  source: /note="Description of Artificial Sequence: Synthetic oligonucleotide"
gaccauagguac

SEQ ID NO: 2516 - RNA, 12 nt, Artificial Sequence
  source: /note="Description of Artificial Sequence: Synthetic oligonucleotide"
uaccuauggucc

SEQ ID NO: 2517 - RNA, 12 nt, Artificial Sequence
  source: /note="Description of Artificial Sequence: Synthetic oligonucleotide"
ggaccauaggua

SEQ ID NO: 2518 - RNA, 12 nt, Artificial Sequence
  source: /note="Description of Artificial Sequence: Synthetic oligonucleotide"
accuaugguccu

SEQ ID NO: 2519 - RNA, 12 nt, Artificial Sequence
  source: /note="Description of Artificial Sequence: Synthetic oligonucleotide"
aggaccauaggu

SEQ ID NO: 2520 - RNA, 12 nt, Artificial Sequence
  source: /note="Description of Artificial Sequence: Synthetic oligonucleotide"
ccuaugguccua

SEQ ID NO: 2521 - RNA, 12 nt, Artificial Sequence
  source: /note="Description of Artificial Sequence: Synthetic oligonucleotide"
uaggaccauagg

SEQ ID NO: 2522 - RNA, 12 nt, Artificial Sequence
  source: /note="Description of Artificial Sequence: Synthetic oligonucleotide"
cuaugguccuag

SEQ ID NO: 2523 - RNA, 12 nt, Artificial Sequence
  source: /note="Description of Artificial Sequence: Synthetic oligonucleotide"
cuaggaccauag

SEQ ID NO: 2524 - RNA, 12 nt, Artificial Sequence
  source: /note="Description of Artificial Sequence: Synthetic oligonucleotide"
uaugguccuagu

SEQ ID NO: 2525 - RNA, 12 nt, Artificial Sequence
  source: /note="Description of Artificial Sequence: Synthetic oligonucleotide"
acuaggaccaua

SEQ ID NO: 2526 - RNA, 12 nt, Artificial Sequence
  source: /note="Description of Artificial Sequence: Synthetic oligonucleotide"
augguccuagua

SEQ ID NO: 2527 - RNA, 12 nt, Artificial Sequence
  source: /note="Description of Artificial Sequence: Synthetic oligonucleotide"
uacuaggaccau

SEQ ID NO: 2528 - RNA, 12 nt, Artificial Sequence
  source: /note="Description of Artificial Sequence: Synthetic oligonucleotide"
ugguccuaguag

SEQ ID NO: 2529 - RNA, 12 nt, Artificial Sequence
  source: /note="Description of Artificial Sequence: Synthetic oligonucleotide"
cuacuaggacca

SEQ ID NO: 2530 - RNA, 12 nt, Artificial Sequence
  source: /note="Description of Artificial Sequence: Synthetic oligonucleotide"
gguccuaguagg

SEQ ID NO: 2531 - RNA, 12 nt, Artificial Sequence
  source: /note="Description of Artificial Sequence: Synthetic oligonucleotide"
ccuacuaggacc

SEQ ID NO: 2532 - RNA, 12 nt, Artificial Sequence
  source: /note="Description of Artificial Sequence: Synthetic oligonucleotide"
guccuaguagga

SEQ ID NO: 2533 - RNA, 12 nt, Artificial Sequence
  source: /note="Description of Artificial Sequence: Synthetic oligonucleotide"
uccuacuaggac

SEQ ID NO: 2534 - RNA, 12 nt, Artificial Sequence
  source: /note="Description of Artificial Sequence: Synthetic oligonucleotide"
uccuaguaggaa

SEQ ID NO: 2535 - RNA, 12 nt, Artificial Sequence
  source: /note="Description of Artificial Sequence: Synthetic oligonucleotide"
uuccuacuagga

SEQ ID NO: 2536 - RNA, 12 nt, Artificial Sequence
  source: /note="Description of Artificial Sequence: Synthetic oligonucleotide"
ccuaguaggaaa

SEQ ID NO: 2537 - RNA, 12 nt, Artificial Sequence
  source: /note="Description of Artificial Sequence: Synthetic oligonucleotide"
uuuccuacuagg

SEQ ID NO: 2538 - RNA, 12 nt, Artificial Sequence
  source: /note="Description of Artificial Sequence: Synthetic oligonucleotide"
cuaguaggaaau

SEQ ID NO: 2539 - RNA, 12 nt, Artificial Sequence
  source: /note="Description of Artificial Sequence: Synthetic oligonucleotide"
auuuccuacuag

SEQ ID NO: 2540 - RNA, 12 nt, Artificial Sequence
  source: /note="Description of Artificial Sequence: Synthetic oligonucleotide"
uaguaggaaaua

SEQ ID NO: 2541 - RNA, 12 nt, Artificial Sequence
  source: /note="Description of Artificial Sequence: Synthetic oligonucleotide"
uauuuccuacua

SEQ ID NO: 2542 - RNA, 12 nt, Artificial Sequence
  source: /note="Description of Artificial Sequence: Synthetic oligonucleotide"
aguaggaaauaa

SEQ ID NO: 2543 - RNA, 12 nt, Artificial Sequence
  source: /note="Description of Artificial Sequence: Synthetic oligonucleotide"
uuauuuccuacu

SEQ ID NO: 2544 - RNA, 12 nt, Artificial Sequence
  source: /note="Description of Artificial Sequence: Synthetic oligonucleotide"
guaggaaauaaa

SEQ ID NO: 2545 - RNA, 12 nt, Artificial Sequence
  source: /note="Description of Artificial Sequence: Synthetic oligonucleotide"
uuuauuuccuac

SEQ ID NO: 2546 - RNA, 12 nt, Artificial Sequence
  source: /note="Description of Artificial Sequence: Synthetic oligonucleotide"
uaggaaauaaau

SEQ ID NO: 2547 - RNA, 12 nt, Artificial Sequence
  source: /note="Description of Artificial Sequence: Synthetic oligonucleotide"
auuuauuuccua

SEQ ID NO: 2548 - RNA, 12 nt, Artificial Sequence
  source: /note="Description of Artificial Sequence: Synthetic oligonucleotide"
aggaaauaaaug

SEQ ID NO: 2549 - RNA, 12 nt, Artificial Sequence
  source: /note="Description of Artificial Sequence: Synthetic oligonucleotide"
cauuuauuuccu

SEQ ID NO: 2550 - RNA, 12 nt, Artificial Sequence
  source: /note="Description of Artificial Sequence: Synthetic oligonucleotide"
ggaaauaaaugu

SEQ ID NO: 2551 - RNA, 12 nt, Artificial Sequence
  source: /note="Description of Artificial Sequence: Synthetic oligonucleotide"
acauuuauuucc

SEQ ID NO: 2552 - RNA, 12 nt, Artificial Sequence
  source: /note="Description of Artificial Sequence: Synthetic oligonucleotide"
gaaauaaaugug

SEQ ID NO: 2553 - RNA, 12 nt, Artificial Sequence
  source: /note="Description of Artificial Sequence: Synthetic oligonucleotide"
cacauuuauuuc

SEQ ID NO: 2554 - RNA, 12 nt, Artificial Sequence
  source: /note="Description of Artificial Sequence: Synthetic oligonucleotide"
aaauaaauguga

SEQ ID NO: 2555 - RNA, 12 nt, Artificial Sequence
  source: /note="Description of Artificial Sequence: Synthetic oligonucleotide"
ucacauuuauuu

SEQ ID NO: 2556 - RNA, 12 nt, Artificial Sequence
  source: /note="Description of Artificial Sequence: Synthetic oligonucleotide"
aauaaaugugau

SEQ ID NO: 2557 - RNA, 12 nt, Artificial Sequence
  source: /note="Description of Artificial Sequence: Synthetic oligonucleotide"
aucacauuuauu

SEQ ID NO: 2558 - RNA, 12 nt, Artificial Sequence
  source: /note="Description of Artificial Sequence: Synthetic oligonucleotide"
auaaaugugauu

SEQ ID NO: 2559 - RNA, 12 nt, Artificial Sequence
  source: /note="Description of Artificial Sequence: Synthetic oligonucleotide"
aaucacauuuau

SEQ ID NO: 2560 - RNA, 12 nt, Artificial Sequence
  source: /note="Description of Artificial Sequence: Synthetic oligonucleotide"
uaaaugugauuu

SEQ ID NO: 2561 - RNA, 12 nt, Artificial Sequence
  source: /note="Description of Artificial Sequence: Synthetic oligonucleotide"
aaaucacauuua

SEQ ID NO: 2562 - RNA, 12 nt, Artificial Sequence
  source: /note="Description of Artificial Sequence: Synthetic oligonucleotide"
aaaugugauuug

SEQ ID NO: 2563 - RNA, 12 nt, Artificial Sequence
  source: /note="Description of Artificial Sequence: Synthetic oligonucleotide"
caaaucacauuu

SEQ ID NO: 2564 - RNA, 12 nt, Artificial Sequence
  source: /note="Description of Artificial Sequence: Synthetic oligonucleotide"
aaugugauuugc

SEQ ID NO: 2565 - RNA, 12 nt, Artificial Sequence
  source: /note="Description of Artificial Sequence: Synthetic oligonucleotide"
gcaaaucacauu

SEQ ID NO: 2566 - RNA, 12 nt, Artificial Sequence
  source: /note="Description of Artificial Sequence: Synthetic oligonucleotide"
augugauuugcc

SEQ ID NO: 2567 - RNA, 12 nt, Artificial Sequence
  source: /note="Description of Artificial Sequence: Synthetic oligonucleotide"
ggcaaaucacau

SEQ ID NO: 2568 - RNA, 12 nt, Artificial Sequence
  source: /note="Description of Artificial Sequence: Synthetic oligonucleotide"
ugugauuugccu

SEQ ID NO: 2569 - RNA, 12 nt, Artificial Sequence
  source: /note="Description of Artificial Sequence: Synthetic oligonucleotide"
aggcaaaucaca

SEQ ID NO: 2570 - RNA, 12 nt, Artificial Sequence
  source: /note="Description of Artificial Sequence: Synthetic oligonucleotide"
gugauuugccuu

SEQ ID NO: 2571 - RNA, 12 nt, Artificial Sequence
  source: /note="Description of Artificial Sequence: Synthetic oligonucleotide"
aaggcaaaucac

SEQ ID NO: 2572 - RNA, 12 nt, Artificial Sequence
  source: /note="Description of Artificial Sequence: Synthetic oligonucleotide"
ugauuugccuuc

SEQ ID NO: 2573 - RNA, 12 nt, Artificial Sequence
  source: /note="Description of Artificial Sequence: Synthetic oligonucleotide"
gaaggcaaauca

SEQ ID NO: 2574 - RNA, 12 nt, Artificial Sequence
  source: /note="Description of Artificial Sequence: Synthetic oligonucleotide"
gauuugccuucu

SEQ ID NO: 2575 - RNA, 12 nt, Artificial Sequence
  source: /note="Description of Artificial Sequence: Synthetic oligonucleotide"
agaaggcaaauc

SEQ ID NO: 2576 - RNA, 12 nt, Artificial Sequence
  source: /note="Description of Artificial Sequence: Synthetic oligonucleotide"
auuugccuucua

SEQ ID NO: 2577 - RNA, 12 nt, Artificial Sequence
  source: /note="Description of Artificial Sequence: Synthetic oligonucleotide"
uagaaggcaaau

SEQ ID NO: 2578 - RNA, 12 nt, Artificial Sequence
  source: /note="Description of Artificial Sequence: Synthetic oligonucleotide"
uuugccuucuag

SEQ ID NO: 2579 - RNA, 12 nt, Artificial Sequence
  source: /note="Description of Artificial Sequence: Synthetic oligonucleotide"
cuagaaggcaaa

SEQ ID NO: 2580 - RNA, 12 nt, Artificial Sequence
  source: /note="Description of Artificial Sequence: Synthetic oligonucleotide"
uugccuucuaga

SEQ ID NO: 2581 - RNA, 12 nt, Artificial Sequence
  source: /note="Description of Artificial Sequence: Synthetic oligonucleotide"
ucuagaaggcaa

SEQ ID NO: 2582 - RNA, 12 nt, Artificial Sequence
  source: /note="Description of Artificial Sequence: Synthetic oligonucleotide"
ugccuucuagaa

SEQ ID NO: 2583 - RNA, 12 nt, Artificial Sequence
  source: /note="Description of Artificial Sequence: Synthetic oligonucleotide"
uucuagaaggca

SEQ ID NO: 2584 - RNA, 12 nt, Artificial Sequence
  source: /note="Description of Artificial Sequence: Synthetic oligonucleotide"
gccuucuagaac

SEQ ID NO: 2585 - RNA, 12 nt, Artificial Sequence
  source: /note="Description of Artificial Sequence: Synthetic oligonucleotide"
guucuagaaggc

SEQ ID NO: 2586 - RNA, 12 nt, Artificial Sequence
  source: /note="Description of Artificial Sequence: Synthetic oligonucleotide"
ccuucuagaaca

SEQ ID NO: 2587 - RNA, 12 nt, Artificial Sequence
  source: /note="Description of Artificial Sequence: Synthetic oligonucleotide"
uguucuagaagg

SEQ ID NO: 2588 - RNA, 12 nt, Artificial Sequence
  source: /note="Description of Artificial Sequence: Synthetic oligonucleotide"
cuucuagaacag

SEQ ID NO: 2589 - RNA, 12 nt, Artificial Sequence
  source: /note="Description of Artificial Sequence: Synthetic oligonucleotide"
cuguucuagaag

SEQ ID NO: 2590 - RNA, 12 nt, Artificial Sequence
  source: /note="Description of Artificial Sequence: Synthetic oligonucleotide"
uucuagaacagu

SEQ ID NO: 2591 - RNA, 12 nt, Artificial Sequence
  source: /note="Description of Artificial Sequence: Synthetic oligonucleotide"
acuguucuagaa

SEQ ID NO: 2592 - RNA, 12 nt, Artificial Sequence
  source: /note="Description of Artificial Sequence: Synthetic oligonucleotide"
ucuagaacagua

SEQ ID NO: 2593 - RNA, 12 nt, Artificial Sequence
  source: /note="Description of Artificial Sequence: Synthetic oligonucleotide"
uacuguucuaga

SEQ ID NO: 2594 - RNA, 12 nt, Artificial Sequence
  source: /note="Description of Artificial Sequence: Synthetic oligonucleotide"
cuagaacaguag

SEQ ID NO: 2595 - RNA, 12 nt, Artificial Sequence
  source: /note="Description of Artificial Sequence: Synthetic oligonucleotide"
cuacuguucuag

SEQ ID NO: 2596 - RNA, 12 nt, Artificial Sequence
  source: /note="Description of Artificial Sequence: Synthetic oligonucleotide"
uagaacaguaga

SEQ ID NO: 2597 - RNA, 12 nt, Artificial Sequence
  source: /note="Description of Artificial Sequence: Synthetic oligonucleotide"
ucuacuguucua

SEQ ID NO: 2598 - RNA, 12 nt, Artificial Sequence
  source: /note="Description of Artificial Sequence: Synthetic oligonucleotide"
agaacaguagac

SEQ ID NO: 2599 - RNA, 12 nt, Artificial Sequence
  source: /note="Description of Artificial Sequence: Synthetic oligonucleotide"
gucuacuguucu

SEQ ID NO: 2600 - RNA, 12 nt, Artificial Sequence
  source: /note="Description of Artificial Sequence: Synthetic oligonucleotide"
gaacaguagaca

SEQ ID NO: 2601 - RNA, 12 nt, Artificial Sequence
  source: /note="Description of Artificial Sequence: Synthetic oligonucleotide"
ugucuacuguuc

SEQ ID NO: 2602 - RNA, 12 nt, Artificial Sequence
  source: /note="Description of Artificial Sequence: Synthetic oligonucleotide"
aacaguagacac

SEQ ID NO: 2603 - RNA, 12 nt, Artificial Sequence
  source: /note="Description of Artificial Sequence: Synthetic oligonucleotide"
gugucuacuguu

SEQ ID NO: 2604 - RNA, 12 nt, Artificial Sequence
  source: /note="Description of Artificial Sequence: Synthetic oligonucleotide"
acaguagacaca

SEQ ID NO: 2605 - RNA, 12 nt, Artificial Sequence
  source: /note="Description of Artificial Sequence: Synthetic oligonucleotide"
ugugucuacugu

SEQ ID NO: 2606 - RNA, 12 nt, Artificial Sequence
  source: /note="Description of Artificial Sequence: Synthetic oligonucleotide"
caguagacacaa

SEQ ID NO: 2607 - RNA, 12 nt, Artificial Sequence
  source: /note="Description of Artificial Sequence: Synthetic oligonucleotide"
uugugucuacug

SEQ ID NO: 2608 - RNA, 12 nt, Artificial Sequence
  source: /note="Description of Artificial Sequence: Synthetic oligonucleotide"
aguagacacaaa

SEQ ID NO: 2609 - RNA, 12 nt, Artificial Sequence
  source: /note="Description of Artificial Sequence: Synthetic oligonucleotide"
uuugugucuacu

SEQ ID NO: 2610 - RNA, 12 nt, Artificial Sequence
  source: /note="Description of Artificial Sequence: Synthetic oligonucleotide"
guagacacaaaa

SEQ ID NO: 2611 - RNA, 12 nt, Artificial Sequence
  source: /note="Description of Artificial Sequence: Synthetic oligonucleotide"
uuuugugucuac

SEQ ID NO: 2612 - RNA, 12 nt, Artificial Sequence
  source: /note="Description of Artificial Sequence: Synthetic oligonucleotide"
uagacacaaaac

SEQ ID NO: 2613 - RNA, 12 nt, Artificial Sequence
  source: /note="Description of Artificial Sequence: Synthetic oligonucleotide"
guuuugugucua

SEQ ID NO: 2614 - RNA, 12 nt, Artificial Sequence
  source: /note="Description of Artificial Sequence: Synthetic oligonucleotide"
agacacaaaaca

SEQ ID NO: 2615 - RNA, 12 nt, Artificial Sequence
  source: /note="Description of Artificial Sequence: Synthetic oligonucleotide"
uguuuugugucu

SEQ ID NO: 2616 - RNA, 12 nt, Artificial Sequence
  source: /note="Description of Artificial Sequence: Synthetic oligonucleotide"
gacacaaaacag

SEQ ID NO: 2617 - RNA, 12 nt, Artificial Sequence
  source: /note="Description of Artificial Sequence: Synthetic oligonucleotide"
cuguuuuguguc

SEQ ID NO: 2618 - RNA, 12 nt, Artificial Sequence
  source: /note="Description of Artificial Sequence: Synthetic oligonucleotide"
acacaaaacagg

SEQ ID NO: 2619 - RNA, 12 nt, Artificial Sequence
  source: /note="Description of Artificial Sequence: Synthetic oligonucleotide"
ccuguuuugugu

SEQ ID NO: 2620 - RNA, 12 nt, Artificial Sequence
  source: /note="Description of Artificial Sequence: Synthetic oligonucleotide"
cacaaaacaggc

SEQ ID NO: 2621 - RNA, 12 nt, Artificial Sequence
  source: /note="Description of Artificial Sequence: Synthetic oligonucleotide"
gccuguuuugug

SEQ ID NO: 2622 - RNA, 12 nt, Artificial Sequence
  source: /note="Description of Artificial Sequence: Synthetic oligonucleotide"
acaaaacaggcu

SEQ ID NO: 2623 - RNA, 12 nt, Artificial Sequence
  source: /note="Description of Artificial Sequence: Synthetic oligonucleotide"
agccuguuuugu

SEQ ID NO: 2624 - RNA, 12 nt, Artificial Sequence
  source: /note="Description of Artificial Sequence: Synthetic oligonucleotide"
caaaacaggcuc

SEQ ID NO: 2625 - RNA, 12 nt, Artificial Sequence
  source: /note="Description of Artificial Sequence: Synthetic oligonucleotide"
gagccuguuuug

SEQ ID NO: 2626 - RNA, 12 nt, Artificial Sequence
  source: /note="Description of Artificial Sequence: Synthetic oligonucleotide"
aaaacaggcuca

SEQ ID NO: 2627 - RNA, 12 nt, Artificial Sequence
  source: /note="Description of Artificial Sequence: Synthetic oligonucleotide"
ugagccuguuuu

SEQ ID NO: 2628 - RNA, 12 nt, Artificial Sequence
  source: /note="Description of Artificial Sequence: Synthetic oligonucleotide"
aaacaggcucag

SEQ ID NO: 2629 - RNA, 12 nt, Artificial Sequence
  source: /note="Description of Artificial Sequence: Synthetic oligonucleotide"
cugagccuguuu

SEQ ID NO: 2630 - RNA, 12 nt, Artificial Sequence
  source: /note="Description of Artificial Sequence: Synthetic oligonucleotide"
aacaggcucagg

SEQ ID NO: 2631 - RNA, 12 nt, Artificial Sequence
  source: /note="Description of Artificial Sequence: Synthetic oligonucleotide"
ccugagccuguu

SEQ ID NO: 2632 - RNA, 12 nt, Artificial Sequence
  source: /note="Description of Artificial Sequence: Synthetic oligonucleotide"
acaggcucagga

SEQ ID NO: 2633 - RNA, 12 nt, Artificial Sequence
  source: /note="Description of Artificial Sequence: Synthetic oligonucleotide"
uccugagccugu

SEQ ID NO: 2634 - RNA, 12 nt, Artificial Sequence
  source: /note="Description of Artificial Sequence: Synthetic oligonucleotide"
caggcucaggac

SEQ ID NO: 2635 - RNA, 12 nt, Artificial Sequence
  source: /note="Description of Artificial Sequence: Synthetic oligonucleotide"
guccugagccug

SEQ ID NO: 2636 - RNA, 12 nt, Artificial Sequence
  source: /note="Description of Artificial Sequence: Synthetic oligonucleotide"
aggcucaggacu

SEQ ID NO: 2637 - RNA, 12 nt, Artificial Sequence
  source: /note="Description of Artificial Sequence: Synthetic oligonucleotide"
aguccugagccu

SEQ ID NO: 2638 - RNA, 12 nt, Artificial Sequence
  source: /note="Description of Artificial Sequence: Synthetic oligonucleotide"
ggcucaggacuu

SEQ ID NO: 2639 - RNA, 12 nt, Artificial Sequence
  source: /note="Description of Artificial Sequence: Synthetic oligonucleotide"
aaguccugagcc

SEQ ID NO: 2640 - RNA, 12 nt, Artificial Sequence
  source: /note="Description of Artificial Sequence: Synthetic oligonucleotide"
gcucaggacuua

SEQ ID NO: 2641 - RNA, 12 nt, Artificial Sequence
  source: /note="Description of Artificial Sequence: Synthetic oligonucleotide"
uaaguccugagc

SEQ ID NO: 2642 - RNA, 12 nt, Artificial Sequence
  source: /note="Description of Artificial Sequence: Synthetic oligonucleotide"
cucaggacuuag

SEQ ID NO: 2643 - RNA, 12 nt, Artificial Sequence
  source: /note="Description of Artificial Sequence: Synthetic oligonucleotide"
cuaaguccugag

SEQ ID NO: 2644 - RNA, 12 nt, Artificial Sequence
  source: /note="Description of Artificial Sequence: Synthetic oligonucleotide"
ucaggacuuagc

SEQ ID NO: 2645 - RNA, 12 nt, Artificial Sequence
  source: /note="Description of Artificial Sequence: Synthetic oligonucleotide"
gcuaaguccuga

SEQ ID NO: 2646 - RNA, 12 nt, Artificial Sequence
  source: /note="Description of Artificial Sequence: Synthetic oligonucleotide"
caggacuuagca

SEQ ID NO: 2647 - RNA, 12 nt, Artificial Sequence
  source: /note="Description of Artificial Sequence: Synthetic oligonucleotide"
ugcuaaguccug

SEQ ID NO: 2648 - RNA, 12 nt, Artificial Sequence
  source: /note="Description of Artificial Sequence: Synthetic oligonucleotide"
aggacuuagcaa

SEQ ID NO: 2649 - RNA, 12 nt, Artificial Sequence
  source: /note="Description of Artificial Sequence: Synthetic oligonucleotide"
uugcuaaguccu

SEQ ID NO: 2650 - RNA, 12 nt, Artificial Sequence
  source: /note="Description of Artificial Sequence: Synthetic oligonucleotide"
ggacuuagcaag

SEQ ID NO: 2651 - RNA, 12 nt, Artificial Sequence
  source: /note="Description of Artificial Sequence: Synthetic oligonucleotide"
cuugcuaagucc

SEQ ID NO: 2652 - RNA, 12 nt, Artificial Sequence
  source: /note="Description of Artificial Sequence: Synthetic oligonucleotide"
gacuuagcaaga

SEQ ID NO: 2653 - RNA, 12 nt, Artificial Sequence
  source: /note="Description of Artificial Sequence: Synthetic oligonucleotide"
ucuugcuaaguc

SEQ ID NO: 2654 - RNA, 12 nt, Artificial Sequence
  source: /note="Description of Artificial Sequence: Synthetic oligonucleotide"
acuuagcaagaa

SEQ ID NO: 2655 - RNA, 12 nt, Artificial Sequence
  source: /note="Description of Artificial Sequence: Synthetic oligonucleotide"
uucuugcuaagu

SEQ ID NO: 2656 - RNA, 12 nt, Artificial Sequence
  source: /note="Description of Artificial Sequence: Synthetic oligonucleotide"
cuuagcaagaag

SEQ ID NO: 2657 - RNA, 12 nt, Artificial Sequence
  source: /note="Description of Artificial Sequence: Synthetic oligonucleotide"
cuucuugcuaag

SEQ ID NO: 2658 - RNA, 12 nt, Artificial Sequence
  source: /note="Description of Artificial Sequence: Synthetic oligonucleotide"
uuagcaagaagu

SEQ ID NO: 2659 - RNA, 12 nt, Artificial Sequence
  source: /note="Description of Artificial Sequence: Synthetic oligonucleotide"
acuucuugcuaa

SEQ ID NO: 2660 - RNA, 12 nt, Artificial Sequence
  source: /note="Description of Artificial Sequence: Synthetic oligonucleotide"
uagcaagaaguu

SEQ ID NO: 2661 - RNA, 12 nt, Artificial Sequence
  source: /note="Description of Artificial Sequence: Synthetic oligonucleotide"
aacuucuugcua

SEQ ID NO: 2662 - RNA, 12 nt, Artificial Sequence
  source: /note="Description of Artificial Sequence: Synthetic oligonucleotide"
agcaagaaguua

SEQ ID NO: 2663 - RNA, 12 nt, Artificial Sequence
  source: /note="Description of Artificial Sequence: Synthetic oligonucleotide"
uaacuucuugcu

SEQ ID NO: 2664 - RNA, 12 nt, Artificial Sequence
  source: /note="Description of Artificial Sequence: Synthetic oligonucleotide"
gcaagaaguuau

SEQ ID NO: 2665 - RNA, 12 nt, Artificial Sequence
  source: /note="Description of Artificial Sequence: Synthetic oligonucleotide"
auaacuucuugc

SEQ ID NO: 2666 - RNA, 12 nt, Artificial Sequence
  source: /note="Description of Artificial Sequence: Synthetic oligonucleotide"
caagaaguuaug

SEQ ID NO: 2667 - RNA, 12 nt, Artificial Sequence
  source: /note="Description of Artificial Sequence: Synthetic oligonucleotide"
cauaacuucuug

SEQ ID NO: 2668 - RNA, 12 nt, Artificial Sequence
  source: /note="Description of Artificial Sequence: Synthetic oligonucleotide"
aagaaguuaugg

SEQ ID NO: 2669 - RNA, 12 nt, Artificial Sequence
  source: /note="Description of Artificial Sequence: Synthetic oligonucleotide"
ccauaacuucuu

SEQ ID NO: 2670 - RNA, 12 nt, Artificial Sequence
  source: /note="Description of Artificial Sequence: Synthetic oligonucleotide"
agaaguuaugga

SEQ ID NO: 2671 - RNA, 12 nt, Artificial Sequence
  source: /note="Description of Artificial Sequence: Synthetic oligonucleotide"
uccauaacuucu

SEQ ID NO: 2672 - RNA, 12 nt, Artificial Sequence
  source: /note="Description of Artificial Sequence: Synthetic oligonucleotide"
gaaguuauggaa

SEQ ID NO: 2673 - RNA, 12 nt, Artificial Sequence
  source: /note="Description of Artificial Sequence: Synthetic oligonucleotide"
uuccauaacuuc

SEQ ID NO: 2674 - RNA, 12 nt, Artificial Sequence
  source: /note="Description of Artificial Sequence: Synthetic oligonucleotide"
aaguuauggaau

SEQ ID NO: 2675 - RNA, 12 nt, Artificial Sequence
  source: /note="Description of Artificial Sequence: Synthetic oligonucleotide"
auuccauaacuu

SEQ ID NO: 2676 - RNA, 12 nt, Artificial Sequence
  source: /note="Description of Artificial Sequence: Synthetic oligonucleotide"
aguuauggaauu

SEQ ID NO: 2677 - RNA, 12 nt, Artificial Sequence
  source: /note="Description of Artificial Sequence: Synthetic oligonucleotide"
aauuccauaacu

SEQ ID NO: 2678 - RNA, 12 nt, Artificial Sequence
  source: /note="Description of Artificial Sequence: Synthetic oligonucleotide"
guuauggaauuc

SEQ ID NO: 2679 - RNA, 12 nt, Artificial Sequence
  source: /note="Description of Artificial Sequence: Synthetic oligonucleotide"
gaauuccauaac

SEQ ID NO: 2680 - RNA, 12 nt, Artificial Sequence
  source: /note="Description of Artificial Sequence: Synthetic oligonucleotide"
uuauggaauucc

SEQ ID NO: 2681 - RNA, 12 nt, Artificial Sequence
  source: /note="Description of Artificial Sequence: Synthetic oligonucleotide"
ggaauuccauaa

SEQ ID NO: 2682 - RNA, 12 nt, Artificial Sequence
  source: /note="Description of Artificial Sequence: Synthetic oligonucleotide"
uauggaauuccu

SEQ ID NO: 2683 - RNA, 12 nt, Artificial Sequence
  source: /note="Description of Artificial Sequence: Synthetic oligonucleotide"
aggaauuccaua

SEQ ID NO: 2684 - RNA, 12 nt, Artificial Sequence
  source: /note="Description of Artificial Sequence: Synthetic oligonucleotide"
auggaauuccuu

SEQ ID NO: 2685 - RNA, 12 nt, Artificial Sequence
  source: /note="Description of Artificial Sequence: Synthetic oligonucleotide"
aaggaauuccau

SEQ ID NO: 2686 - RNA, 12 nt, Artificial Sequence
  source: /note="Description of Artificial Sequence: Synthetic oligonucleotide"
uggaauuccuuu

SEQ ID NO: 2687 - RNA, 12 nt, Artificial Sequence
  source: /note="Description of Artificial Sequence: Synthetic oligonucleotide"
aaaggaauucca

SEQ ID NO: 2688 - RNA, 12 nt, Artificial Sequence
  source: /note="Description of Artificial Sequence: Synthetic oligonucleotide"
ggaauuccuuuu

SEQ ID NO: 2689 - RNA, 12 nt, Artificial Sequence
  source: /note="Description of Artificial Sequence: Synthetic oligonucleotide"
aaaaggaauucc

SEQ ID NO: 2690 - RNA, 12 nt, Artificial Sequence
  source: /note="Description of Artificial Sequence: Synthetic oligonucleotide"
gaauuccuuuua

SEQ ID NO: 2691 - RNA, 12 nt, Artificial Sequence
  source: /note="Description of Artificial Sequence: Synthetic oligonucleotide"
uaaaaggaauuc

SEQ ID NO: 2692 - RNA, 12 nt, Artificial Sequence
  source: /note="Description of Artificial Sequence: Synthetic oligonucleotide"
aauuccuuuuau

SEQ ID NO: 2693 - RNA, 12 nt, Artificial Sequence
  source: /note="Description of Artificial Sequence: Synthetic oligonucleotide"
auaaaaggaauu

SEQ ID NO: 2694 - RNA, 12 nt, Artificial Sequence
  source: /note="Description of Artificial Sequence: Synthetic oligonucleotide"
auuccuuuuauu

SEQ ID NO: 2695 - RNA, 12 nt, Artificial Sequence
  source: /note="Description of Artificial Sequence: Synthetic oligonucleotide"
aauaaaaggaau

SEQ ID NO: 2696 - RNA, 12 nt, Artificial Sequence
  source: /note="Description of Artificial Sequence: Synthetic oligonucleotide"
uuccuuuuauug

SEQ ID NO: 2697 - RNA, 12 nt, Artificial Sequence
  source: /note="Description of Artificial Sequence: Synthetic oligonucleotide"
caauaaaaggaa

SEQ ID NO: 2698 - RNA, 12 nt, Artificial Sequence
  source: /note="Description of Artificial Sequence: Synthetic oligonucleotide"
uccuuuuauuga

SEQ ID NO: 2699 - RNA, 12 nt, Artificial Sequence
  source: /note="Description of Artificial Sequence: Synthetic oligonucleotide"
ucaauaaaagga

SEQ ID NO: 2700 - RNA, 12 nt, Artificial Sequence
  source: /note="Description of Artificial Sequence: Synthetic oligonucleotide"
ccuuuuauugaa

SEQ ID NO: 2701 - RNA, 12 nt, Artificial Sequence
  source: /note="Description of Artificial Sequence: Synthetic oligonucleotide"
uucaauaaaagg

SEQ ID NO: 2702 - RNA, 12 nt, Artificial Sequence
  source: /note="Description of Artificial Sequence: Synthetic oligonucleotide"
cuuuuauugaaa

SEQ ID NO: 2703 - RNA, 12 nt, Artificial Sequence
  source: /note="Description of Artificial Sequence: Synthetic oligonucleotide"
uuucaauaaaag

SEQ ID NO: 2704 - RNA, 12 nt, Artificial Sequence
  source: /note="Description of Artificial Sequence: Synthetic oligonucleotide"
uuuuauugaaac

SEQ ID NO: 2705 - RNA, 12 nt, Artificial Sequence
  source: /note="Description of Artificial Sequence: Synthetic oligonucleotide"
guuucaauaaaa

SEQ ID NO: 2706 - RNA, 12 nt, Artificial Sequence
  source: /note="Description of Artificial Sequence: Synthetic oligonucleotide"
uuuauugaaaca

SEQ ID NO: 2707 - RNA, 12 nt, Artificial Sequence
  source: /note="Description of Artificial Sequence: Synthetic oligonucleotide"
uguuucaauaaa

SEQ ID NO: 2708 - RNA, 12 nt, Artificial Sequence
  source: /note="Description of Artificial Sequence: Synthetic oligonucleotide"
uuauugaaacau

SEQ ID NO: 2709 - RNA, 12 nt, Artificial Sequence
  source: /note="Description of Artificial Sequence: Synthetic oligonucleotide"
auguuucaauaa

SEQ ID NO: 2710 - RNA, 12 nt, Artificial Sequence
  source: /note="Description of Artificial Sequence: Synthetic oligonucleotide"
uauugaaacauc

SEQ ID NO: 2711 - RNA, 12 nt, Artificial Sequence
  source: /note="Description of Artificial Sequence: Synthetic oligonucleotide"
gauguuucaaua

SEQ ID NO: 2712 - RNA, 12 nt, Artificial Sequence
  source: /note="Description of Artificial Sequence: Synthetic oligonucleotide"
auugaaacauca

SEQ ID NO: 2713 - RNA, 12 nt, Artificial Sequence
  source: /note="Description of Artificial Sequence: Synthetic oligonucleotide"
ugauguuucaau

SEQ ID NO: 2714 - RNA, 12 nt, Artificial Sequence
  source: /note="Description of Artificial Sequence: Synthetic oligonucleotide"
uugaaacaucag

SEQ ID NO: 2715 - RNA, 12 nt, Artificial Sequence
  source: /note="Description of Artificial Sequence: Synthetic oligonucleotide"
cugauguuucaa

SEQ ID NO: 2716 - RNA, 12 nt, Artificial Sequence
  source: /note="Description of Artificial Sequence: Synthetic oligonucleotide"
ugaaacaucagc

SEQ ID NO: 2717 - RNA, 12 nt, Artificial Sequence
  source: /note="Description of Artificial Sequence: Synthetic oligonucleotide"
gcugauguuuca

SEQ ID NO: 2718 - RNA, 12 nt, Artificial Sequence
  source: /note="Description of Artificial Sequence: Synthetic oligonucleotide"
gaaacaucagca

SEQ ID NO: 2719 - RNA, 12 nt, Artificial Sequence
  source: /note="Description of Artificial Sequence: Synthetic oligonucleotide"
ugcugauguuuc

SEQ ID NO: 2720 - RNA, 12 nt, Artificial Sequence
  source: /note="Description of Artificial Sequence: Synthetic oligonucleotide"
aaacaucagcaa

SEQ ID NO: 2721 - RNA, 12 nt, Artificial Sequence
  source: /note="Description of Artificial Sequence: Synthetic oligonucleotide"
uugcugauguuu

SEQ ID NO: 2722 - RNA, 12 nt, Artificial Sequence
  source: /note="Description of Artificial Sequence: Synthetic oligonucleotide"
aacaucagcaaa

SEQ ID NO: 2723 - RNA, 12 nt, Artificial Sequence
  source: /note="Description of Artificial Sequence: Synthetic oligonucleotide"
uuugcugauguu

SEQ ID NO: 2724 - RNA, 12 nt, Artificial Sequence
  source: /note="Description of Artificial Sequence: Synthetic oligonucleotide"
acaucagcaaag

SEQ ID NO: 2725 - RNA, 12 nt, Artificial Sequence
  source: /note="Description of Artificial Sequence: Synthetic oligonucleotide"
cuuugcugaugu

SEQ ID NO: 2726 - RNA, 12 nt, Artificial Sequence
  source: /note="Description of Artificial Sequence: Synthetic oligonucleotide"
caucagcaaaga

SEQ ID NO: 2727 - RNA, 12 nt, Artificial Sequence
  source: /note="Description of Artificial Sequence: Synthetic oligonucleotide"
ucuuugcugaug

SEQ ID NO: 2728 - RNA, 12 nt, Artificial Sequence
  source: /note="Description of Artificial Sequence: Synthetic oligonucleotide"
aucagcaaagac

SEQ ID NO: 2729 - RNA, 12 nt, Artificial Sequence
  source: /note="Description of Artificial Sequence: Synthetic oligonucleotide"
gucuuugcugau

SEQ ID NO: 2730 - RNA, 12 nt, Artificial Sequence
  source: /note="Description of Artificial Sequence: Synthetic oligonucleotide"
ucagcaaagaca

SEQ ID NO: 2731 - RNA, 12 nt, Artificial Sequence
  source: /note="Description of Artificial Sequence: Synthetic oligonucleotide"
ugucuuugcuga

SEQ ID NO: 2732 - RNA, 12 nt, Artificial Sequence
  source: /note="Description of Artificial Sequence: Synthetic oligonucleotide"
cagcaaagacaa

SEQ ID NO: 2733 - RNA, 12 nt, Artificial Sequence
  source: /note="Description of Artificial Sequence: Synthetic oligonucleotide"
uugucuuugcug

SEQ ID NO: 2734 - RNA, 12 nt, Artificial Sequence
  source: /note="Description of Artificial Sequence: Synthetic oligonucleotide"
agcaaagacaag

SEQ ID NO: 2735 - RNA, 12 nt, Artificial Sequence
  source: /note="Description of Artificial Sequence: Synthetic oligonucleotide"
cuugucuuugcu

SEQ ID NO: 2736 - RNA, 12 nt, Artificial Sequence
  source: /note="Description of Artificial Sequence: Synthetic oligonucleotide"
gcaaagacaaga

SEQ ID NO: 2737 - RNA, 12 nt, Artificial Sequence
  source: /note="Description of Artificial Sequence: Synthetic oligonucleotide"
ucuugucuuugc

SEQ ID NO: 2738 - RNA, 12 nt, Artificial Sequence
  source: /note="Description of Artificial Sequence: Synthetic oligonucleotide"
caaagacaagac

SEQ ID NO: 2739 - RNA, 12 nt, Artificial Sequence
  source: /note="Description of Artificial Sequence: Synthetic oligonucleotide"
gucuugucuuug

SEQ ID NO: 2740 - RNA, 12 nt, Artificial Sequence
  source: /note="Description of Artificial Sequence: Synthetic oligonucleotide"
aaagacaagaca

SEQ ID NO: 2741 - RNA, 12 nt, Artificial Sequence
  source: /note="Description of Artificial Sequence: Synthetic oligonucleotide"
ugucuugucuuu

SEQ ID NO: 2742 - DNA, 19 bp, Artificial Sequence
  source: /note="Description of Artificial Sequence: Synthetic oligonucleotide"
tctctataatggtgaatat

SEQ ID NO: 2743 - DNA, 19 bp, Artificial Sequence
  source: /note="Description of Artificial Sequence: Synthetic oligonucleotide"
aaatacacaaagaaagccc

SEQ ID NO: 2744 - DNA, 19 bp, Artificial Sequence
  source: /note="Description of Artificial Sequence: Synthetic oligonucleotide"
tttatttcctactaggacc

SEQ ID NO: 2745 - DNA, 19 bp, Artificial Sequence
  source: /note="Description of Artificial Sequence: Synthetic oligonucleotide"
tttcctactaggaccatag

SEQ ID NO: 2746 - DNA, 19 bp, Artificial Sequence
  source: /note="Description of Artificial Sequence: Synthetic oligonucleotide"
tttaatttgttctctataa

SEQ ID NO: 2747 - DNA, 19 bp, Artificial Sequence
  source: /note="Description of Artificial Sequence: Synthetic oligonucleotide"
agctccaactaccacaagt

SEQ ID NO: 2748 - DNA, 19 bp, Artificial Sequence
  source: /note="Description of Artificial Sequence: Synthetic oligonucleotide"
tcaattactacttgcttcc

SEQ ID NO: 2749 - DNA, 19 bp, Artificial Sequence
  source: /note="Description of Artificial Sequence: Synthetic oligonucleotide"
atcaattactacttgcttc

SEQ ID NO: 2750 - DNA, 19 bp, Artificial Sequence
  source: /note="Description of Artificial Sequence: Synthetic oligonucleotide"
attagctgtatcgtcaagg

SEQ ID NO: 2751 - DNA, 19 bp, Artificial Sequence
  source: /note="Description of Artificial Sequence: Synthetic oligonucleotide"
ttctccatcaattactact

SEQ ID NO: 2752 - DNA, 19 bp, Artificial Sequence
  source: /note="Description of Artificial Sequence: Synthetic oligonucleotide"
tcgagaatatccaagagac

SEQ ID NO: 2753 - DNA, 19 bp, Artificial Sequence
  source: /note="Description of Artificial Sequence: Synthetic oligonucleotide"
gatttagtattatttatgg

SEQ ID NO: 2754 - DNA, 19 bp, Artificial Sequence
  source: /note="Description of Artificial Sequence: Synthetic oligonucleotide"
atatcttcaaatgatttag

SEQ ID NO: 2755 - DNA, 19 bp, Artificial Sequence
  source: /note="Description of Artificial Sequence: Synthetic oligonucleotide"
tctagaaggcaaatcacat

SEQ ID NO: 2756 - DNA, 19 bp, Artificial Sequence
  source: /note="Description of Artificial Sequence: Synthetic oligonucleotide"
tgtctactgttctagaagg

SEQ ID NO: 2757 - DNA, 19 bp, Artificial Sequence
  source: /note="Description of Artificial Sequence: Synthetic oligonucleotide"
aattccataacttcttgct

SEQ ID NO: 2758 - DNA, 19 bp, Artificial Sequence
  source: /note="Description of Artificial Sequence: Synthetic oligonucleotide"
aataaaaggaattccataa

SEQ ID NO: 2759 - DNA, 19 bp, Artificial Sequence
  source: /note="Description of Artificial Sequence: Synthetic oligonucleotide"
ataacttcttgctaagtcc

SEQ ID NO: 2760 - DNA, 19 bp, Artificial Sequence
  source: /note="Description of Artificial Sequence: Synthetic oligonucleotide"
atcaattactacttgcttc

SEQ ID NO: 2761 - DNA, 19 bp, Artificial Sequence
  source: /note="Description of Artificial Sequence: Synthetic oligonucleotide"
tcaattactacttgcttcc

SEQ ID NO: 2762 - DNA, 19 bp, Artificial Sequence
  source: /note="Description of Artificial Sequence: Synthetic oligonucleotide"
tttcctactaggaccatag

SEQ ID NO: 2763 - DNA, 19 bp, Artificial Sequence
  source: /note="Description of Artificial Sequence: Synthetic oligonucleotide"
taactttacattcatcagg

SEQ ID NO: 2764 - DNA, 19 bp, Artificial Sequence
  source: /note="Description of Artificial Sequence: Synthetic oligonucleotide"
ttatttcctactaggacca

SEQ ID NO: 2765 - DNA, 19 bp, Artificial Sequence
  source: /note="Description of Artificial Sequence: Synthetic oligonucleotide"
aatctagttatgactattc

SEQ ID NO: 2766 - DNA, 19 bp, Artificial Sequence
  source: /note="Description of Artificial Sequence: Synthetic oligonucleotide"
tatctttattaaattctcc

SEQ ID NO: 2767 - DNA, 19 bp, Artificial Sequence
  source: /note="Description of Artificial Sequence: Synthetic oligonucleotide"
tttatttcctactaggacc

SEQ ID NO: 2768 - DNA, 19 bp, Artificial Sequence
  source: /note="Description of Artificial Sequence: Synthetic oligonucleotide"
aattccataacttcttgct

SEQ ID NO: 2769 - DNA, 19 bp, Artificial Sequence
  source: /note="Description of Artificial Sequence: Synthetic oligonucleotide"
tctataatggtgaatatct

SEQ ID NO: 2770 - DNA, 19 bp, Artificial Sequence
  source: /note="Description of Artificial Sequence: Synthetic oligonucleotide"
gaagcaagtagtaattgat

SEQ ID NO: 2771 - DNA, 19 bp, Artificial Sequence
  source: /note="Description of Artificial Sequence: Synthetic oligonucleotide"
ggaagcaagtagtaattga

SEQ ID NO: 2772 - DNA, 19 bp, Artificial Sequence
  source: /note="Description of Artificial Sequence: Synthetic oligonucleotide"
ctatggtcctagtaggaaa

SEQ ID NO: 2773 - DNA, 19 bp, Artificial Sequence
  source: /note="Description of Artificial Sequence: Synthetic oligonucleotide"
cctgatgaatgtaaagtta

SEQ ID NO: 2774 - DNA, 19 bp, Artificial Sequence
  source: /note="Description of Artificial Sequence: Synthetic oligonucleotide"
tggtcctagtaggaaataa

SEQ ID NO: 2775 - DNA, 19 bp, Artificial Sequence
  source: /note="Description of Artificial Sequence: Synthetic oligonucleotide"
gaatagtcataactagatt

SEQ ID NO: 2776 - DNA, 19 bp, Artificial Sequence
  source: /note="Description of Artificial Sequence: Synthetic oligonucleotide"
ggagaatttaataaagata

SEQ ID NO: 2777 - DNA, 19 bp, Artificial Sequence
  source: /note="Description of Artificial Sequence: Synthetic oligonucleotide"
ggtcctagtaggaaataaa

SEQ ID NO: 2778 - DNA, 19 bp, Artificial Sequence
  source: /note="Description of Artificial Sequence: Synthetic oligonucleotide"
agcaagaagttatggaatt

SEQ ID NO: 2779 - DNA, 19 bp, Artificial Sequence
  source: /note="Description of Artificial Sequence: Synthetic oligonucleotide"
agatattcaccattataga

SEQ ID NO: 2780 - DNA, 19 bp, Artificial Sequence
  source: /note="Description of Artificial Sequence: Synthetic oligonucleotide"
gatttagtattatttatgg

SEQ ID NO: 2781 - DNA, 19 bp, Artificial Sequence
  source: /note="Description of Artificial Sequence: Synthetic oligonucleotide"
agctccaactaccacaagt

SEQ ID NO: 2782 - DNA, 19 bp, Artificial Sequence
  source: /note="Description of Artificial Sequence: Synthetic oligonucleotide"
ttatttatggcaaatacac

SEQ ID NO: 2783 - DNA, 19 bp, Artificial Sequence
  source: /note="Description of Artificial Sequence: Synthetic oligonucleotide"
aataaaaggaattccataa

SEQ ID NO: 2784 - DNA, 19 bp, Artificial Sequence
  source: /note="Description of Artificial Sequence: Synthetic oligonucleotide"
ttctccatcaattactact

SEQ ID NO: 2785 - DNA, 19 bp, Artificial Sequence
  source: /note="Description of Artificial Sequence: Synthetic oligonucleotide"
ttctctataatggtgaata

SEQ ID NO: 2786 - DNA, 19 bp, Artificial Sequence
  source: /note="Description of Artificial Sequence: Synthetic oligonucleotide"
aaatacacaaagaaagccc

SEQ ID NO: 2787 - DNA, 19 bp, Artificial Sequence
  source: /note="Description of Artificial Sequence: Synthetic oligonucleotide"
tttaatttgttctctataa

SEQ ID NO: 2788 - DNA, 19 bp, Artificial Sequence
  source: /note="Description of Artificial Sequence: Synthetic oligonucleotide"
tctctataatggtgaatat

SEQ ID NO: 2789 - DNA, 19 bp, Artificial Sequence
  source: /note="Description of Artificial Sequence: Synthetic oligonucleotide"
tctagaaggcaaatcacat

SEQ ID NO: 2790 - DNA, 19 bp, Artificial Sequence
  source: /note="Description of Artificial Sequence: Synthetic oligonucleotide"
ccataaataatactaaatc

SEQ ID NO: 2791 - DNA, 19 bp, Artificial Sequence
  source: /note="Description of Artificial Sequence: Synthetic oligonucleotide"
acttgtggtagttggagct

SEQ ID NO: 2792 - DNA, 19 bp, Artificial Sequence
  source: /note="Description of Artificial Sequence: Synthetic oligonucleotide"
gtgtatttgccataaataa

SEQ ID NO: 2793 - DNA, 19 bp, Artificial Sequence
  source: /note="Description of Artificial Sequence: Synthetic oligonucleotide"
ttatggaattccttttatt

SEQ ID NO: 2794 - DNA, 19 bp, Artificial Sequence
  source: /note="Description of Artificial Sequence: Synthetic oligonucleotide"
agtagtaattgatggagaa

SEQ ID NO: 2795 - DNA, 19 bp, Artificial Sequence
  source: /note="Description of Artificial Sequence: Synthetic oligonucleotide"
tattcaccattatagagaa

SEQ ID NO: 2796 - DNA, 19 bp, Artificial Sequence
  source: /note="Description of Artificial Sequence: Synthetic oligonucleotide"
gggctttctttgtgtattt

SEQ ID NO: 2797 - DNA, 19 bp, Artificial Sequence
  source: /note="Description of Artificial Sequence: Synthetic oligonucleotide"
ttatagagaacaaattaaa

SEQ ID NO: 2798 - DNA, 19 bp, Artificial Sequence
  source: /note="Description of Artificial Sequence: Synthetic oligonucleotide"
atattcaccattatagaga

SEQ ID NO: 2799 - DNA, 19 bp, Artificial Sequence
  source: /note="Description of Artificial Sequence: Synthetic oligonucleotide"
atgtgatttgccttctaga

SEQ ID NO: 2800 - DNA, 19 bp, Artificial Sequence
  source: /note="Description of Artificial Sequence: Synthetic oligonucleotide"
aatcacatttatttcctac

SEQ ID NO: 2801 - DNA, 19 bp, Artificial Sequence
  source: /note="Description of Artificial Sequence: Synthetic oligonucleotide"
gtttctccatcaattacta

SEQ ID NO: 2802 - DNA, 19 bp, Artificial Sequence
  source: /note="Description of Artificial Sequence: Synthetic oligonucleotide"
atatcttcaaatgatttag

SEQ ID NO: 2803 - DNA, 19 bp, Artificial Sequence
  source: /note="Description of Artificial Sequence: Synthetic oligonucleotide"
tttcaataaaaggaattcc

SEQ ID NO: 2804 - DNA, 19 bp, Artificial Sequence
  source: /note="Description of Artificial Sequence: Synthetic oligonucleotide"
cttgctaagtcctgagcct

SEQ ID NO: 2805 - DNA, 19 bp, Artificial Sequence
  source: /note="Description of Artificial Sequence: Synthetic oligonucleotide"
ctgatgtttcaataaaagg

SEQ ID NO: 2806 - DNA, 19 bp, Artificial Sequence
  source: /note="Description of Artificial Sequence: Synthetic oligonucleotide"
taatttgttctctataatg

SEQ ID NO: 2807 - DNA, 19 bp, Artificial Sequence
  source: /note="Description of Artificial Sequence: Synthetic oligonucleotide"
atcttcaaatgatttagta

SEQ ID NO: 2808 - DNA, 19 bp, Artificial Sequence
  source: /note="Description of Artificial Sequence: Synthetic oligonucleotide"
atcgtcaaggcactcttgc

SEQ ID NO: 2809 - DNA, 19 bp, Artificial Sequence
  source: /note="Description of Artificial Sequence: Synthetic oligonucleotide"
tgtctactgttctagaagg

SEQ ID NO: 2810 - DNA, 19 bp, Artificial Sequence
  source: /note="Description of Artificial Sequence: Synthetic oligonucleotide"
gtaggaaataaatgtgatt

SEQ ID NO: 2811 - DNA, 19 bp, Artificial Sequence
  source: /note="Description of Artificial Sequence: Synthetic oligonucleotide"
tagtaattgatggagaaac

SEQ ID NO: 2812 - DNA, 19 bp, Artificial Sequence
  source: /note="Description of Artificial Sequence: Synthetic oligonucleotide"
ctaaatcatttgaagatat

SEQ ID NO: 2813 - DNA, 19 bp, Artificial Sequence
  source: /note="Description of Artificial Sequence: Synthetic oligonucleotide"
ggaattccttttattgaaa

SEQ ID NO: 2814 - DNA, 19 bp, Artificial Sequence
  source: /note="Description of Artificial Sequence: Synthetic oligonucleotide"
aggctcaggacttagcaag

SEQ ID NO: 2815 - DNA, 19 bp, Artificial Sequence
  source: /note="Description of Artificial Sequence: Synthetic oligonucleotide"
ccttttattgaaacatcag

SEQ ID NO: 2816 - DNA, 19 bp, Artificial Sequence
  source: /note="Description of Artificial Sequence: Synthetic oligonucleotide"
cattatagagaacaaatta

SEQ ID NO: 2817 - DNA, 19 bp, Artificial Sequence
  source: /note="Description of Artificial Sequence: Synthetic oligonucleotide"
tactaaatcatttgaagat

SEQ ID NO: 2818 - DNA, 19 bp, Artificial Sequence
  source: /note="Description of Artificial Sequence: Synthetic oligonucleotide"
gcaagagtgccttgacgat

SEQ ID NO: 2819 - DNA, 19 bp, Artificial Sequence
  source: /note="Description of Artificial Sequence: Synthetic oligonucleotide"
ccttctagaacagtagaca

SEQ ID NO: 2820 - DNA, 19 bp, Artificial Sequence
  source: /note="Description of Artificial Sequence: Synthetic oligonucleotide"
attagctgtatcgtcaagg

SEQ ID NO: 2821 - DNA, 19 bp, Artificial Sequence
  source: /note="Description of Artificial Sequence: Synthetic oligonucleotide"
tcgagaatatccaagagac

SEQ ID NO: 2822 - DNA, 19 bp, Artificial Sequence
  source: /note="Description of Artificial Sequence: Synthetic oligonucleotide"
tcttcagagtccttaactc

SEQ ID NO: 2823 - DNA, 19 bp, Artificial Sequence
  source: /note="Description of Artificial Sequence: Synthetic oligonucleotide"
ataacttcttgctaagtcc

SEQ ID NO: 2824 - DNA, 19 bp, Artificial Sequence
  source: /note="Description of Artificial Sequence: Synthetic oligonucleotide"
aatgattctgaattagctg

SEQ ID NO: 2825 - DNA, 19 bp, Artificial Sequence
  source: /note="Description of Artificial Sequence: Synthetic oligonucleotide"
tataatggtgaatatcttc

SEQ ID NO: 2826 - DNA, 19 bp, Artificial Sequence
  source: /note="Description of Artificial Sequence: Synthetic oligonucleotide"
tatcgtcaaggcactcttg

SEQ ID NO: 2827 - DNA, 19 bp, Artificial Sequence
  source: /note="Description of Artificial Sequence: Synthetic oligonucleotide"
tattgttggatcatattcg

SEQ ID NO: 2828 - DNA, 19 bp, Artificial Sequence
  source: /note="Description of Artificial Sequence: Synthetic oligonucleotide"
ccttgacgatacagctaat

SEQ ID NO: 2829 - DNA, 19 bp, Artificial Sequence
  source: /note="Description of Artificial Sequence: Synthetic oligonucleotide"
gtctcttggatattctcga

SEQ ID NO: 2830 - DNA, 19 bp, Artificial Sequence
  source: /note="Description of Artificial Sequence: Synthetic oligonucleotide"
gagttaaggactctgaaga

SEQ ID NO: 2831 - DNA, 19 bp, Artificial Sequence
  source: /note="Description of Artificial Sequence: Synthetic oligonucleotide"
ggacttagcaagaagttat

SEQ ID NO: 2832 - DNA, 19 bp, Artificial Sequence
  source: /note="Description of Artificial Sequence: Synthetic oligonucleotide"
cagctaattcagaatcatt

SEQ ID NO: 2833 - DNA, 19 bp, Artificial Sequence
  source: /note="Description of Artificial Sequence: Synthetic oligonucleotide"
gaagatattcaccattata

SEQ ID NO: 2834 - DNA, 19 bp, Artificial Sequence
  source: /note="Description of Artificial Sequence: Synthetic oligonucleotide"
caagagtgccttgacgata

SEQ ID NO: 2835 - DNA, 19 bp, Artificial Sequence
  source: /note="Description of Artificial Sequence: Synthetic oligonucleotide"
cgaatatgatccaacaata

SEQ ID NO: 2836 - DNA, 353 bp, Homo sapiens
ccaggctggaatgcagtggcgccatctcagctcactgcaacctccatctcccaggttcaagcgattctcgtgcctcggcctcctgagtagctgggattacaggcgtgtgccactacactcaactaatttttgtatttttaggagagacggggtttcaccctgttggccaggctggtctcgaactcctgacctcaagtgattcacccaccttggcctcataaacctgttttgcagaactcatttattcagcaaatatttattgagtgcctaccagatgccagtcaccgcacaaggcactgggtatatggtatccccaaacaagagacataatcccggtccttaggtagtgctag

SEQ ID NO: 2837 - DNA, 353 bp, Macaca fascicularis
  modified_base (112)..(112): a, c, t, g, unknown or other
  modified_base (211)..(213): a, c, t, g, unknown or other
ccaggctggaatgcagtggcgccatctcagctcactgcaacctccatctcccaggttcaagcgattctcgtgcctcggcatcctgagtagctgggattacaggcatgtgccnccacactcaactaatttttgtagttttaggagagacagggtttcaccctattggccaggctggtctcgaactcctgacctcaagtgattcacccacctnnncctcataaagccgttttgcagaactcatttattcagcaaatatttattgagtgcctaccagatgccagtcatttcacaaggcactgggtatatggtatccccaaacaagagacataatcctggtccttagctagtgctag

1. A composition comprising a RNAi agent comprising a sense strand and an antisense strand, wherein the antisense strand comprises at least 15 contiguous nucleotides differing by 0, 1, 2, or 3 nucleotides from the antisense strand of a RNAi agent specific to KRAS provided in Table 1.

2. The composition of claim 1, wherein the composition further comprises a second RNAi agent to KRAS.

3. The composition of claim 1, wherein the RNAi agent comprises at least one modified backbone and/or at least one 2′-modified nucleotide.

4. The composition of claim 1, wherein the RNAi agent is ligated to one or more agent selected from: diagnostic compound, reporter group, cross-linking agent, nuclease-resistance conferring moiety, natural or unusual nucleobase, lipophilic molecule, cholesterol, lipid, lectin, steroid, uvaol, hecigenin, diosgenin, terpene, triterpene, sarsasapogenin, Friedelin, epifriedelanol-derivatized lithocholic acid, vitamin, carbohydrate, dextran, pullulan, chitin, chitosan, synthetic carbohydrate, oligo lactate 15-mer, natural polymer, low- or medium-molecular weight polymer, inulin, cyclodextrin, hyaluronic acid, protein, protein-binding agent, integrin-targeting molecule, polycationic, peptide, polyamine, peptide mimic, and/or transferrin.

5. (canceled)

6. (canceled)

7. (canceled)

8. (canceled)

9. A method of treating a KRAS-related disease in an individual, comprising the step of administering to the individual a therapeutically effective amount of a composition comprising a RNAi agent comprising a sense strand and an antisense strand, wherein the antisense strand comprises at least 15 contiguous nucleotides differing by 0, 1, 2, or 3 nucleotides from the antisense strand of a RNAi agent specific to KRAS provided in Table 1.

10. The method of claim 9, wherein the KRAS-related disease is a proliferative disease, cardio-facio-cutaneous (CFC) syndrome or Noonan syndrome.

11. The method of claim 9, wherein the method further comprises the step of administering an additional treatment for a proliferative disease, cardio-facio-cutaneous (CFC) syndrome or Noonan syndrome.

12. The method of claim 11, wherein the method further comprises the step of administering an additional RNAi agent to KRAS.

13. A method of inhibiting the expression of KRAS in an individual, comprising the step of administering to the individual a therapeutically effective amount of a composition comprising a RNAi agent comprising a sense strand and an antisense strand, wherein the antisense strand comprises at least 15 contiguous nucleotides differing by 0, 1, 2, or 3 nucleotides from the antisense strand of a RNAi agent specific to KRAS provided in Table 1.

14. The method of claim 13, wherein the KRAS-related disease isa proliferative disease, cardio-facio-cutaneous (CFC) syndrome or Noonan syndrome.

15. (canceled)

16. (canceled)

17. (canceled)

18. (canceled)

19. The composition of claim 1, wherein all the pyrimidines are 2′ O-methyl-modified nucleotides.

20. (canceled)

21. The composition of claim 1, wherein the RNAi agent has an EC50 of no more than about 1 nM in MiaPaca2 cells.

22. The composition of claim 1, wherein the RNAi agent is capable of inhibiting expression of KRAS by at least about 70% at a concentration of 10 nM in RKO cells in vitro.
